(19) United States
(12) Patent Application Publication
(10) Pub. No.: US 2023/0138045 A1
(43) Pub. Date: May 4, 2023

(54) WNT SUPER AGONISTS

(71) Applicant: Surrozen Operating, Inc., South San Francisco, CA (US)

(72) Inventor: Yang LI, Mountain View, CA (US)

(21) Appl. No.: 17/801,624

(22) PCT Filed: Feb. 24, 2021
(86) PCT No.: PCT/US2021/019484

§ 371 Date: Aug. 23, 2022

Related U.S. Application Data
(60) Provisional application No. 63/114,368, filed on Nov. 16, 2020.
(60) Provisional application No. 62/980,870, filed on Feb. 24, 2020.

(51) Int. Cl. C07K 16/28; A61P 43/00

(52) U.S. Cl. CPC C07K 16/2863; A61P 43/00

(57) ABSTRACT

The present invention provides multispecific multivalent antigen binding molecules that can function as WNT agonist, WNT enhancer, and WNT super agonist molecules by binding and activating at least one or two WNT receptors and a WNT enhancer.

### CROSS-REFERENCE TO RELATED APPLICATIONS

[0001] This application claims priority to U.S. Provisional Application No. 62/980,870, filed on Feb. 24, 2020 and U.S. Provisional Application No. 63/114,368, filed on Nov. 16, 2020, each of which is herein incorporated by reference in its entirety.

### STATEMENT REGARDING SEQUENCE LISTING

[0002] The Sequence Listing associated with this application is provided in text format in lieu of a paper copy, and is hereby incorporated by reference into the specification. The name of the text file containing the Sequence Listing is SRZN_018_02WO_ST25.txt. The text file is 1,179 KB, created on Feb. 24, 2021, and is being submitted electronically vis EFS-Web.

### FIELD OF THE INVENTION

[0003] The present invention provides antigen binding formats having both WNT agonist and WNT enhancer activities or WNT agonist or WNT enhancer activities alone.

### BACKGROUND OF THE INVENTION

[0004] WNT (“Wingless-related integration site” or “Wingless and Int-1” or “Wingless-Int”) ligands and their signals play key roles in the control of development, homeostasis and regeneration of many essential organs and tissues, including bone, liver, skin, stomach, intestine, kidney, central nervous system, mammary gland, taste bud, ovary, cochlea and many other tissues (reviewed, e.g., by Clevers, Loh, and Nusse (2014) Science; 346:54). Modulation of WNT signaling pathways has potential for treatment of degenerative diseases and tissue injuries.

[0005] The seven-pass transmembrane receptor Frizzled (FZD) is critical for nearly all WNT signaling, and the N-terminal FZD cysteine rich domain (CRD) serves as the WNT binding domain. In addition to FZD, the WNT/β-catenin pathway requires the Low-density lipoprotein receptor related proteins 5 and 6 (LRP5/6) to serve as co-receptors. LRP5 and LRP6 are functionally redundant single-pass transmembrane receptors. Biochemical studies of LRP6 indicate that different WNTs may bind to different extracellular domains of the LRP5/6 proteins. The LRP6 extracellular domain contains four repeating sequences of β-propeller and epidermal growth factor-like (βP-E) domains. The crystal structures of the extracellular LRP6 regions indicate that the βP-E repeats represent two discrete, compact, rigid structures, each containing two βP-E pairs. WNT9b binds the first two βP-E repeats on the extracellular domain of LRP6, whereas WNT3a binds the last two βP-E domains.

[0006] Non-WNT agonists or enhancers include Norrin and R-Spondin (RSPO), respectively. Norrin is a Fz4-specific ligand that, in conjunction with binding and activation of another WNT receptor, LRP5, forms a WNT surrogate or mimetic molecule.

[0007] The four RSPO genes represent a family of conserved secreted proteins that can enhance the WNT pathway signaling. LGR4/5/6 (leucine-rich repeat-containing GPCRs 4, 5, and 6) are receptors for RSPOs.

[0008] The role of RSPOs appears to be to stabilize the WNT receptors, FZD and LRP5/6, to promote or enhance WNT signaling. RSPO 1-4 are a family of ligands that amplify WNT signals. Each of the RSPOs work through a receptor complex that contains Zinc and Ring Finger 3 (ZNRF3) or Ring Finger Protein 43 (RNF43) on one end and a Leucine-rich repeat-containing G-protein coupled receptor 4-6 (LGR4-6) on the other (reviewed, e.g., by Knight and Hankenson 2014, Matrix Biology; 37: 157-161). RSPO might also work through additional mechanisms of action (Lebensohn and Rohatgi 2018, eLife, 7:e33126). ZNRF3 and RNF43 are two membrane-bound E3 ligases specifically targeting WNT receptors (FZD1-10 and LRP5 or LRP6) for degradation. Binding of an RSPO to ZNRF3/RNF43 and LGR4-6 causes clearance or sequestration of the ternary complex, which removes E3 ligases from WNT receptors and stabilizes WNT receptors, resulting in enhanced WNT signals. Each RSPO contains two Furin domains (1 and 2), with Furin domain 1 binding to ZNRF3/RNF43, and Furin domain 2 binding to LGR4-6. Fragments of RSPOs containing Furin domains 1 and 2 are sufficient for amplifying WNT signaling.

[0009] Antibodies are a well-established and rapidly growing drug class with at least 45 antibody-based products currently marketed for imaging or therapy in the United States and/or Europe with ˜$100 billion in total worldwide sales. This major clinical and commercial success with antibody therapeutics has fueled much interest in developing the next generation antibody drugs including bispecific antibodies. As their name implies, bispecific antibodies or multispecific antibodies (collectively “MsAbs”) bind to at least two different antigens, or at least two different epitopes on the same antigen, as first demonstrated more than 50 years ago. Engineering monospecific antibodies for multispecificity opens up many new potential therapeutic applications as evidenced by >30 BsAb in clinical development.

[0010] Bispecific or multispecific antibodies are a class of engineered antibody and antibody-like proteins that, in contrast to ‘regular’ monospecific antibodies, combine two or more different specific antigen binding elements in a single construct. Since bispecific antibodies do not typically occur in nature, they are constructed either chemically or biologically, using techniques such as cell fusion or recombinant DNA technologies. The ability to bind two or more different epitopes with a single molecule offers a number of potential advantages. One approach is to use the specificity of one arm as a targeting site for individual molecules, cellular markers or organisms, such as bacteria and viruses, while the other arm functions as an effector site for the recruitment of effector cells or delivery of molecular payloads to the target, such as drugs, cytokines or toxins. Alternatively, bispecifics can be used to dual target, allowing detection or binding of a target cell type with much higher specificity than monospecific antibodies.

[0011] The modular architecture of immunoglobulins has been exploited to create a growing number (>60) of alternative MsAb formats (see, e.g., Spiess et al. (2015) Mol. Immunol. 67:95-106). MsAb are classified here into five distinct structural groups: (i) bispecific IgG (BsIgG) (ii) IgG appended with an additional antigen-binding moiety (iii) MsAb fragments (iv) Multispecific fusion proteins and (v) MsAb conjugates. Each of these different MsAb formats brings different properties in binding valency for each antigen, geometry of antigen-binding sites, pharmacokinetic half-life, and in some cases effector functions.

[0012] For antagonistic MsAbs antibodies, which represent the vast majority of the MsAb molecules in development, the geometry of the antigen binding modules is less critical. However, for agonistic MsAbs, these molecules need to faithfully mimic the activity of the natural ligand, the binding geometry could be crucial (see, e.g., Shi, et al. (2018) J. Biol. Chem. 293:5909-5919). Such is true of WNT surrogate molecules, which are required to bind and activate two spatially separated WNT receptors, FZD and LRP.

[0013] WNT surrogate molecules which can bind to the hetero-oligomeric WNT/LRP receptor complex have been described previously (see, e.g., WO2019/126398, US 2020-0308287 A1, U.S. Ser. No. 17/257,817 and WO2020/010308) as have WNT enhancers using RSPO (see, e.g., WO2018/140821, US 2020-0048324 A1, WO2018/132572, US 2020-0024338 A1, 17/257,820 and WO2020/014271). However, a combination WNT surrogate molecule and enhancer, e.g., a WNT surrogate molecule that facilitates hetero-oligomerization in specific tissues along with WNT enhancement facilitated by RSPO or a mimetic thereof, has not been previously disclosed, Thus, a need exists to develop different antigen binding formats that mimic the binding of a natural ligand, e.g., FZD and LRP receptors, to hetero-oligomeric complexes that elicit agonistic biological activity, as well as enhancing WNT activity, e.g., using RSPO mimetics. The present invention fulfills this need by providing flexible structures of multispecific antibody (MsAb) formats that bind to different receptors (co-receptors) and acting either as a mimetic or antagonist of the natural ligand.

### BRIEF DESCRIPTION OF THE DRAWINGS

[0014] FIGS. 1A-M show the structure-function analysis of different configurations of WNT surrogate molecules in tandem scFv-IgG, Fv-IgG, Fab-IgG, and Fv-Fab formats: (A) schematic drawing of the different structures created using anti-LRP and anti-FZD antibody fragments is shown; (B) shows relative activity of these WNT surrogate molecules or WNT3A on WNT-responsive HEK293 STF reporter cell lines; (C) shows the ability of RSPO to potentiate the activity of these WNT surrogates; and (D-M) show the ability of Fv-IgG structures containing different FZD-binders to stimulate WNT pathways in the presence of RSPO.

[0015] FIGS. 2A-E show the structure-function analysis of anti-FZD binders fused with a mutant RPSO (RSPO2-RA) in different configurations: schematic drawing (A), WNT signaling activity (B), and effects on receptor levels (C) of Fv-IgGs fused to RSPOR2A are shown (in (C), at 103, the lines from top to bottom correspond to: anti-GFP, untreated, anti-GFP-RSPO2A, F12578-RSPO2RA, and no stain); (D) shows the activity of additional FZD binders fused to RSPO2RA; and (E) shows the activity of monovalent fusion proteins. “F” indicates anti-FZD binder, and “aGFP” indicates antiGFP antibody serving as negative control.

[0016] FIGS. 3A-M shows the activity of trispecific, hexavalent molecules containing FZD, LRP, and E3-ligase binding moieties: (A) shows a schematic drawing of a WNT surrogate (anti-FZD, anti-LRP bispecific antibody) fused to RSPO2-RA; (B-K) show that molecules constructed with RSPO2RA and FZD binders of different specificity all demonstrate both WNT surrogate and RSPO mimetic activities (E, F, G, K are from HEK293 cells transfected with FZD4, FZD9, FZD10, and FZD4, respectively); (J) shows additional attachment sites for RSPO2RA on the WNT mimetic molecule; (K) shows the activity of molecules with the formats shown in (J) (at log −8 of the left graph, the lines from top to bottom correspond to: L6-F4-2+20 nM Rspo, L6-F4-2-RSPO2RA-CH, L6-F4-2-RSPO2RA-NL, L6-F4-2-RSPO2RA-CL, and L6-F4-2; at log −8 of the right graph, the lines from top to bottom correspond to: L6-F4-RSPO2RA-CL, L6-F4+20 nM RSPO2, L6-F4-RSPO2RA-CH, L6-F4-RSPO2RA-NL, and L6-F4); and (L) and (M) show the activity of additional RSPO2RA fusions containing FZD binders with and without an LRP binder and fused at other locations on the IgG.

[0017] FIGS. 4A-C show the activity of additional trispecific molecules containing FZD, LRP, and E3-ligase binding moieties: (A) shows a schematic drawing a WNT surrogate (anti-FZD, anti-LRP bispecific antibody in various scFv-IgG configurations, top two structures) fused to RSPO2RA (bottom four structures); and (B-C) show the activity of molecules in (A) in the presence or absence of RSPO. In (B), at log −8, the symbols from top to bottom correspond to: L6-F12578 (Fv-IgG)+RSPO2, HC1-L6-F12578-RSPO2RA-KH+HC2-L6-F12578-HF, HC1-L6-F12578-RSPO2RA-KH+HC2-F12578-HF-RSPO2RA, HC1-L6-F12578-RSPO2RA-KH+HC2-F12578-HF, L6-F12578 (Fv-IgG), and HC1-L6-F12578-KH+HC2-F12578-HF).

[0018] FIGS. 5A-H shows WNT super agonist stimulates the expansion of several mouse and human organoids: (A, C, E, G) representative brightfield images of organoid outgrowth after 7 or 14 days. Scale bars, 400 μm. (B, D, F, H) quantification of cell viability using CellTiter-Glo®. Each datapoint represents an independent experiment. A) Outgrowth of mouse small intestinal organoids after 7 days using 0.1 nM of surrogate molecules and B) quantification of cell viability. C) Outgrowth of human small intestinal organoids after 7 days using 1 nM of surrogate molecules and D) quantification of cell viability. E) Outgrowth of mouse hepatocyte organoids after 14 days using 1 nM of surrogate molecules and F) quantification of cell viability. G) Outgrowth of human tubuloids after 7 days using 1 nM of surrogate molecules and H) quantification of cell viability.

[0019] FIGS. 6A-H show in vivo effects of WNT mimetic molecules. To test the in vivo effect of WNT mimetics with different FZD specificity, the panel of WNT mimetics were dosed at 3 mg per kg intraperitoneally on day 0, 3, 7 and 10 in C57Bl/6J mice. (A-C) The relative changes (%) of bone mineral densities (BMD) of whole body (A), femur (B) and lumbar (C) of the various treatment groups on day 7 and 13 by DEXA analysis. (D) The temporal body weight changes. (E) The relative changes (%) of body fat content on day 7 and 13. (F-H) The organ weight of salivary gland (F), liver (G), and small intestine (H) at the takedown on day 14. Statistical Analyses: One-way ANOVA, with post hoc Holm-Sidak test (GraphPad Prism). All comparisons made with the anti-GFP group. Data are show as mean standard deviation (SD). *p<0.05, **p<0.01, ***p<0.001, ****p<0.0001.

[0020] FIG. 7 shows formats of illustrative WNT surrogate molecules. For the Fab-IgG structure shown (and other structures), the Fab regions of the FZD binding domain and the LRP5/6 binding domain are indicated as being derived from the heavy chain or light chain of a parental antibody, but all other combinations of Fabs are also contemplated, e.g., HC-HC or LC-LC Fabs in either the heavy chain or light chain of the Fab-IgG construct, or switching the order of the two Fabs in either or both arms of the construct.

[0021] FIG. 8 shows formats of illustrative WNT super agonist molecules.

### SUMMARY OF THE INVENTION

[0022] The present invention provides an WNT super agonist molecule comprising a plurality of antigen binding domains, wherein the binding domains bind to at least one first WNT receptor and at least one second WNT receptor, and a WNT enhancer. In certain embodiments, a surrogate molecule is an agonist mimicking a natural ligand by facilitating the hetero-oligomerization of at least two different receptors in the present of a tissue targeting moiety. In certain embodiments, the binding domains are engineered to mimic a natural WNT ligand. In further embodiments, the binding domains are fused directly together. In yet further embodiments, the binding domains of the super agonist are fused together with a peptide linker. In some embodiments, the peptide linker is about 1 amino acid in length to about 30 amino acids in length. In other embodiments, the peptide linker is about 5 amino acids in length to about 15 amino acids in length. In another embodiment, the peptide linker comprises one or more glycine and/or serine residues. In one embodiment, at least one of the binding domains is selected from the group consisting of: an scFv, a VHH/sdAb, a Fab fragment, a Fab′2 fragment, a diabody, and an Fv fragment. In a further embodiment, at least one of the binding domains is fused to an Fc fragment. In a further embodiment, the structure is an Fv-IgG.

[0023] In particular embodiments, the disclosure provides a WNT super agonist molecule, comprising: a) a Frizzled (FZD) binding domain; b) an LRP5/6 binding domain; and c) an E3 ligase binding domain, wherein the super agonist molecule activates the canonical WNT signaling pathway in a cell. In certain embodiments: the FZD binding domain binds one or more FZD receptor; the LRP5/6 binding domain binds one or more of LRP5 and/or LRP6; and the E3 ligase binding domain binds ZNRF3 and/or RNF43. In certain embodiments, the WNT super agonist comprises one or more polypeptides, wherein at least one polypeptide comprises a FZD binding domain fused to an LRP5/6 binding domain, and wherein at least one polypeptide comprises an E3 ligase binding domain fused to a FZD binding domain or an LRP5/6 binding domain. In particular embodiments, the fused binding domains are fused directly together and/or fused via a peptide linker. In some embodiments, the peptide linker is about 1 amino acid in length to about 30 amino acids in length, or about 5 amino acids in length to about 15 amino acids in length, optionally 5, 6, 7, 8, 9, 10, 11, 12, 13, 14 or 15 amino acids in length. In some embodiments, the peptide linker comprises one or more glycine and/or serine residues. In particular embodiments of WNT super agonist molecules, at least one of the binding domains is selected from the group consisting of: an scFv, a VHH/sdAb, a Fab fragment, a Fab′2 fragment, a diabody, and an Fv fragment. In particular embodiments of WNT super agonist molecules, at least one of the binding domains is fused to an Fc fragment, optionally wherein the Fc fragment is from an IgG, IgM, IgA, IgD or IgE antibody isotype or an α, δ, ε, γ, or μ antibody heavy chain. In certain embodiments, the WNT super agonist molecule has ro comprises a structure depicted in Table 3 or Table 4, e.g., the Fv-IgG structure. In certain embodiments, the WNT enhancer domain of the WNT super agonist molecule comprises an E3 ligase binding domain selected from the group consisting of: a mutant R-spondin (RSPO) protein and an antibody or functional fragment thereof. In some embodiments, the mutant RSPO protein has reduced binding to Leucine-rich repeat-containing G-protein receptors 4-6 (LGR4-6) as compared to wild type RSPO. In some embodiments, the E3 ligase binding domain binds a Zinc and Ring Finger 3 (ZNRF3) and/or a Ring Finger Protein 43 (RNF43). In particular embodiments, the E3 ligase binding domain is selected from the group consisting of: an scFv, a VHH/sdAb, a Fab fragment, a Fab′2 fragment, a diabody, and an Fv fragment. In various embodiments, the E3 ligase binding domain is fused to a C-terminus of an Fc fragment of an Fv-IgG, either directly or via a linker, optionally wherein the linker is a peptide linker of about 1 amino acid in length to about 30 amino acids in length, or about 5 amino acids in length to about 15 amino acids in length, or 5, 6, 7, 8, 9, 10, 11, 12, 13, 14 or 15 amino acids in length. In various embodiments, the E3 ligase binding domain is fused to a C-terminus of: a) a light chain or fragment thereof of a FZD binding domain; b) a heavy chain or fragment thereof of a FZD binding domain; c) a light chain or fragment thereof of a LRP5/6 binding domain; or d) a heavy chain or fragment thereof of a LRP5/6 binding domain, either directly or via a linker, optionally wherein the linker is a peptide linker of about 1 amino acid in length to about 30 amino acids in length, or about 5 amino acids in length to about 15 amino acids in length, or 5, 6, 7, 8, 9, 10, 11, 12, 13, 14 or 15 amino acids in length. In various embodiments, the binding domain that binds an E3 ubiquitin ligase is fused to a N-terminus of: a) a light chain or fragment thereof of a FZD binding domain; b) a heavy chain or fragment thereof of a FZD binding domain; c) a light chain or fragment thereof of a LRP5/6 binding domain; or d) a heavy chain or fragment thereof of a LRP5/6 binding domain, either directly or via a linker, optionally wherein the linker is a peptide linker of about 1 amino acid in length to about 30 amino acids in length, or about 5 amino acids in length to about 15 amino acids in length, or 5, 6, 7, 8, 9, 10, 11, 12, 13, 14 or 15 amino acids in length. In some embodiments, a WNT super agonist comprises a polypeptide having at least 90% or 95% sequence identity to a sequence provided in Table 3 or Table 4, or a combination of polypeptides, each having at least 90% or 95% sequence identity to a sequence provided in Table 3 or Table 4.

[0024] In a related embodiment, the disclosure provides a WNT enhancer molecule (e.g., an RSPO mimetic) comprising at least one binding domain that binds to at least one WNT receptor; and a WNT enhancer. In certain embodiments, an R-spondin (RSPO) mimetic comprises a first binding composition that binds a WNT receptor and a second binding composition that binds an E3 ubiquitin ligase. In some embodiments, the first binding composition binds a FZD receptor or an LRP receptor, optionally LRP5 and/or LRP6. In some embodiments, the first binding composition is selected from the group consisting of: an scFv, a VHH/sdAb, a Fab fragment, a Fab′2 fragment, a diabody, and an Fv fragment. In certain embodiments, the second binding composition is an RSPO protein, optionally a mutant RSPO protein, or an antibody or fragment thereof that binds an E3 ubiquitin ligase. In certain embodiments, the binding compositions are fused directly together or via a peptide linker. In some embodiments, the peptide linker is about 1 amino acid in length to about 30 amino acids in length, or about 5 amino acids in length to about 15 amino acids in length, optionally 5, 6, 7, 8, 9, 10, 11, 12, 13, 14 or 15 amino acids in length. In certain embodiments of WNT enhancer molecules, the peptide linker comprises one or more glycine and/or serine residues. In some embodiments, the WNT enhancer comprises a polypeptide having at least 90% or 95% sequence identity to a sequence provided in Table 3 or Table 4, or a combination of polypeptides, each having at least 90% or 95% sequence identity to a sequence provided in Table 3 or Table 4.

[0025] In yet a further embodiment, the disclosure provides a WNT surrogate molecule comprising at least one binding domain that binds a FZD receptor and at least one binding domain that binds an LRP receptor. In certain embodiments, a WNT surrogate comprises: a) a Frizzled (FZD) binding domain; and b) an LRP5/6 binding domain, wherein the super agonist molecule activates the canonical WNT signaling pathway in a cell. In certain embodiments: a) the FZD binding domain binds one or more FZD receptor; and b) the LRP5/6 binding domain binds LRP5 and/or LRP6. In some embodiments, the FZD binding domain is selected from the group consisting of: an scFv, a VHH/sdAb, a Fab fragment, a Fab′2 fragment, a diabody, and an Fv fragment. In some embodiments, the LRP5/6 binding domain is selected from the group consisting of: an scFv, a VHH/sdAb, a Fab fragment, a Fab′2 fragment, a diabody, and an Fv fragment. In some embodiments, the binding domains are fused directly together or via a peptide linker. In particular embodiments, the peptide linker is about 1 amino acid in length to about 30 amino acids in length, about 5 amino acids in length to about 15 amino acids in length, optionally 5, 6, 7, 8, 9, 10, 11, 12, 13, 14 or 15 amino acids in length. In particular embodiments, the peptide linker comprises one or more glycine and/or serine residues. In some embodiments, the WNT surrogate molecule comprises a polypeptide having at least 90% or 95% sequence identity to a sequence provided in Table 3 or Table 4, or a combination of polypeptides, each having at least 90% or 95% sequence identity to a sequence provided in Table 3 or Table 4.

[0026] In various embodiments of any of the molecules disclosed herein that comprise a WNT enhancer domain or an E3 ligase binding domain, the WNT enhancer is selected from the group consisting of: a wild-type RSPO protein, a mutant RSPO protein, and a binding domain that binds to an E3 ubiquitin ligase. In further embodiments, the mutant RSPO protein has reduced binding to Leucine-rich repeat-containing G-protein receptors 4-6 (LGR4-6) as compared to wild type RSPO. In yet further embodiments, the binding domain that binds a E3 ubiquitin ligase binds to a Zinc and Ring Finger 3 (ZNRF3) and/or a Ring Finger Protein 43 (RNF43). In yet a further embodiment, the binding domain that binds to an E3 ubiquitin ligase is selected from the group consisting of: an scFv, a VHH/sdAb, a Fab fragment, a Fab′2 fragment, a diabody, and an Fv fragment. In certain embodiments, the binding domain that binds an E3 ubiquitin ligase is fused to a C-terminus of an Fc fragment of the Fv-IgG. In other embodiments, the binding domain that binds an E3 ubiquitin ligase is fused to a C-terminus of: a) a light chain of a binding domain that binds to a FZD receptor; b) a heavy chain of a binding domain that binds to a FZD receptor; c) a light chain of a binding domain that binds to an LRP receptor; or b) a heavy chain of a binding domain that binds to an LRP receptor. In another embodiment, the binding domain that binds an E3 ubiquitin ligase is fused to a N-terminus of: a) a light chain of a binding domain that binds to a FZD receptor; b) a heavy chain of a binding domain that binds to a FZD receptor; c) a light chain of a binding domain that binds to an LRP receptor; or d) a heavy chain of a binding domain that binds to an LRP receptor. In certain embodiments, the super-agonist comprises a structure depicted in Table 3 or Table 4.

[0027] In various embodiments of any of the molecules disclosed herein, one or more of the polypeptides comprises an additional sequence, e.g., a tag, which may, e.g., be used to facilitate purification of the polypeptide. Examples of such tag molecules include, but are not limited to, His tags, Myc tags, and Flag tags.

[0028] In one embodiment, the present invention provides a method for treating a subject having a disease or disorder associated with reduced WNT signaling, comprising administering to the subject an effective amount of the WNT super agonist molecule, a WNT enhancer molecule, a WNT surrogate molecule, or a pharmaceutical composition comprising one or more of these molecules. In certain embodiments, the disease or disorder is selected from the group consisting of: oral mucositis, short bowel syndrome, inflammatory bowel diseases (IBD), other gastrointestinal disorders; treatment of metabolic syndrome, dyslipidemia, treatment of diabetes, treatment of pancreatitis, conditions where exocrine or endocrine pancreas tissues are damaged; conditions where enhanced epidermal regeneration is desired, e.g., epidermal wound healing, treatment of diabetic foot ulcers, syndromes involving tooth, nail, or dermal hypoplasia, etc., conditions where angiogenesis is beneficial; myocardial infarction, coronary artery disease, heart failure; immunodeficiencies, graft versus host diseases, acute kidney injuries, chronic kidney diseases, chronic obstructive pulmonary diseases (COPD), idiopathic pulmonary fibrosis (IPF), cirrhosis, acute liver failure, chronic liver diseases with hepatitis C or B virus infection or post-antiviral drug therapies, alcoholic liver diseases, alcoholic hepatitis, non-alcoholic liver diseases with steatosis or steatohepatitis, treatment of hearing loss, including internal and external loss of auditory hair cells, vestibular hypofunction, macular degeneration, treatment of vitreoretinopathy, diabetic retinopathy, other diseases of retinal degeneration, Fuchs' dystrophy, other corneal diseases, stroke, traumatic brain injury, Alzheimer's disease, multiple sclerosis and other conditions affecting the blood brain barrier; spinal cord injuries, bone related diseases, other spinal cord diseases, and alopecia.

[0029] In one embodiment, the present invention provides a method of generating, culturing, or maintaining an organ tissue, cell, or an organoid culture, comprising contacting the organ tissue, cell, or an organoid culture with a WNT super agonist molecule, a WNT enhancer molecule, or a WNT surrogate molecule, or a pharmaceutical composition comprising the WNT super agonist molecule, WNT enhancer molecule, or WNT surrogate molecule. In a further embodiment, the organ tissue obtained is from a donor and contacted with the WNT super agonist molecule, WNT enhancer molecule, or WNT surrogate molecule, optionally by perfusing the organ tissue ex vivo with a composition comprising the WNT super agonist molecule, WNT enhancer molecule, or WNT surrogate molecule. In yet another embodiment, the viability of the organ tissue is maintained by contacting donor organ tissue in vivo, with a composition comprising the WNT super agonist or the WNT enhancer molecule. In another embodiment, the organoid culture is maintained by contacting the organoid culture with the WNT super agonist molecule, WNT enhancer molecule, or WNT surrogate molecule, optionally by culturing the organoid culture in a medium comprising the WNT super agonist or the WNT enhancer.

[0030] In a further related embodiment, the disclosure provides a method for inducing bone formation or increasing bone density in a subject, comprising administering to the subject an effective amount of a WNT super agonist molecule, WNT enhancer molecule, or WNT surrogate molecule, or a pharmaceutical composition comprising one or more of these molecules. In some embodiments, the method is performed using a WNT super agonist molecule that binds FZD5, FZD8, and FZD9. In some embodiments, the method is performed using a WNT surrogatet molecule that binds FZD5, FZD8, and FZD9.

[0031] In a further related embodiment, the disclosure provides a method for regenerating a salivary gland or inducing salivary gland growth in a subject, comprising administering to the subject an effective amount of a WNT super agonist molecule, WNT enhancer molecule, or WNT surrogate molecule, or a pharmaceutical composition comprising one or more of these molecules. In some embodiments, the methods is performed for treating hyposalivation in the subject. In some embodiments, the method is performed using a WNT super agonist molecule that binds FZD1, FZD2, and FZD7. In some embodiments, the method is performed using a WNT surrogate molecule that binds FZD1, FZD2, and FZD7.

[0032] In some embodiments, the present invention provides an RSPO mimetic comprising a first binding composition that binds one WNT receptor and a second binding composition that binds an E3 ubiquitin ligase. In some embodiments, the first binding composition binds a FZD receptor or an LRP receptor. In further embodiments, the first binding composition is selected from the group consisting of: an scFv, a VHH/sdAb, a Fab fragment, a Fab′2 fragment, a diabody, and an Fv fragment. In yet further embodiments, the second binding composition is an RSPO protein or an antibody or fragment thereof that binds an E3 ubiquitin ligase.

### DETAILED DESCRIPTION

[0033] As used herein, including the appended claims, the singular forms of words such as “a,” “an,” and “the,” include their corresponding plural references unless the context clearly dictates otherwise.

[0034] Throughout this specification, unless the context requires otherwise, the word “comprise”, or variations such as “comprises” or “comprising”, will be understood to imply the inclusion of a stated element or integer or group of elements or integers but not the exclusion of any other element or integer or group of elements or integers.

[0035] Each embodiment in this specification is to be applied mutatis mutandis to every other embodiment unless expressly stated otherwise.

[0036] All references cited herein are incorporated by reference to the same extent as if each individual publication, patent application, or patent, was specifically and individually indicated to be incorporated by reference.

### I. Definitions

[0037] “Activity” of a molecule may describe or refer to the binding of the molecule to a ligand or to a receptor, to catalytic activity, to the ability to stimulate gene expression, to antigenic activity, to the modulation of activities of other molecules, and the like. “Activity” of a molecule may also refer to activity in modulating or maintaining cell-to-cell interactions, e.g., adhesion, or activity in maintaining a structure of a cell, e.g., cell membranes or cytoskeleton. “Activity” may also mean specific activity, e.g., [catalytic activity]/[mg protein], or [immunological activity]/[mg protein], or the like.

[0038] The terms “administering” or “introducing” or “providing”, as used herein, refer to delivery of a composition to a cell, to cells, tissues and/or organs of a subject, or to a subject. Such administering or introducing may take place in vivo, in vitro or ex vivo.

[0039] As is well known in the art, an antibody is an immunoglobulin molecule capable of specific binding to a target, such as a carbohydrate, polynucleotide, lipid, polypeptide, etc., through at least one epitope recognition site, located in the variable region of the immunoglobulin molecule. As used herein, the term encompasses not only intact polyclonal or monoclonal antibodies, but also fragments thereof (such as dAb, Fab, Fab′, F(ab′)2, Fv), single chain (scFv), VHH, synthetic variants thereof, naturally occurring variants, fusion proteins comprising an antibody or an antigen-binding fragment thereof, humanized antibodies, chimeric antibodies, and any other modified configuration of the immunoglobulin molecule that comprises an antigen-binding site or fragment (epitope recognition site) of the required specificity. “Diabodies”, multivalent or multispecific fragments constructed by gene fusion (WO94/13804; P. Holliger et al (1993), Proc. Natl. Acad. Sci. USA 90 6444-6448) are also a particular form of antibody contemplated herein. Minibodies comprising a scFv joined to a CH3 domain are also included herein (See e.g., S. Hu et al. (1996), Cancer Res., 56:3055-3061; Ward, E. S. et al. (1989) Nature 341:544-546; Bird et al. (1988) Science 242:423-426; Huston et al. (1988) Proc. Natl. Acad. Sci. USA 85:5879-5883; PCT/US92/09965; WO94/13804; P. Holliger et al. (1993) Proc. Natl. Acad. Sci. USA 90:6444-6448; and Y. Reiter et al. (1996) Nature Biotech. 14:1239-1245).

[0040] The term “antigen-binding fragment” as used herein refers to a polypeptide fragment that contains at least one CDR of an immunoglobulin heavy and/or light chain, or of a VHH, that binds to the antigen of interest, in particular to one or more FZD receptor or LRP5 or LRP6 receptor. In this regard, an antigen-binding fragment of the herein described antibodies may comprise 1, 2, 3, 4, 5, or all 6 CDRs of a VH and VL sequence set forth herein from antibodies that bind one or more FZD receptor or LRP5 and/or LRP6. In particular embodiments, an antigen-binding fragment may comprise all three VH CDRs or all three VL CDRs. Similarly, an antigen binding fragment thereof may comprise all three CDRs of a VHH binding fragment. An antigen-binding fragment of a FZD-specific antibody is capable of binding to a FZD receptor. An antigen-binding fragment of a LRP5/6-specific antibody is capable of binding to a LRP5 and/or LRP6 receptor. As used herein, the term encompasses not only isolated fragments but also polypeptides comprising an antigen-binding fragment of an antibody disclosed herein, such as, for example, fusion proteins comprising an antigen-binding fragment of an antibody disclosed herein, such as, e.g., a fusion protein comprising a VHH that binds one or more FZD receptors and a VHH that binds LRP5 and/or LRP6.

[0041] The term “antigen” refers to a molecule or a portion of a molecule capable of being bound by a selective binding agent, such as an antibody, and additionally capable of being used in an animal to produce antibodies capable of binding to an epitope of that antigen. In certain embodiments, a binding agent (e.g., a WNT surrogate molecule or binding region thereof) is said to specifically bind an antigen when it preferentially recognizes its target antigen in a complex mixture of proteins and/or macromolecules. In certain embodiments, a WNT surrogate molecule or binding region thereof (e.g., an antibody or antigen-binding fragment thereof) is said to specifically bind an antigen when the equilibrium dissociation constant is ≤10⁻⁷ or ≤10⁻⁸ M. In some embodiments, the equilibrium dissociation constant may be ≤10⁻⁹ M or ≤10⁻¹⁰ M.

[0042] As used herein, the term “CDR” refers to at least one of the three hypervariable regions of a heavy or light chain variable (V) region. Proceeding from the N-terminus of a heavy or light chain, these regions are denoted as “CDR1,” “CDR2,” and “CDR3” respectively. An antigen-binding site, therefore, includes six CDRs, comprising the CDR set from each of a heavy and a light chain V region. A polypeptide comprising a single CDR, (e.g., a CDR1, CDR2 or CDR3) is referred to herein as a “molecular recognition unit.” Crystallographic analysis of a number of antigen-antibody complexes has demonstrated that the amino acid residues of CDRs form extensive contact with bound antigen, wherein the most extensive antigen contact is with the heavy chain CDR3. Thus, the molecular recognition units are primarily responsible for the specificity of an antigen-binding site. In certain embodiments, antibodies and antigen-binding fragments thereof as described herein include a heavy chain and a light chain CDRs, respectively interposed between a heavy chain and a light chain framework regions (FRs)which provide support to the CDRs and define the spatial relationship of the CDRs relative to each other.

[0043] As used herein, the term “FRs” refer to the four flanking amino acid sequences which frame the CDRs of a heavy or light chain V region. Some FR residues may contact bound antigen; however, FRs are primarily responsible for folding the V region into the antigen-binding site, particularly the FR residues directly adjacent to the CDRs. Within FRs, certain amino residues and certain structural features are very highly conserved. In this regard, all V region sequences contain an internal disulfide loop of around 90 amino acid residues. When the V regions fold into a binding-site, the CDRs are displayed as projecting loop motifs which form an antigen-binding surface. It is generally recognized that there are conserved structural regions of FRs which influence the folded shape of the CDR loops into certain “canonical” structures-regardless of the precise CDR amino acid sequence. Further, certain FR residues are known to participate in non-covalent interdomain contacts which stabilize the interaction of the antibody heavy and light chains. The structures and locations of immunoglobulin CDRs and variable domains may be determined by reference to Kabat, E. A. et al., Sequences of Proteins of Immunological Interest. 4th Edition. US Department of Health and Human Services. 1987, and updates thereof, now available on the Internet (immuno.bme.nwu.edu).

[0044] A “monoclonal antibody” refers to a homogeneous antibody population wherein the monoclonal antibody is comprised of amino acids (naturally occurring and non-naturally occurring) that are involved in the selective binding of an epitope. Monoclonal antibodies are highly specific, being directed against a single epitope. The term “monoclonal antibody” encompasses not only intact monoclonal antibodies and full-length monoclonal antibodies, but also fragments thereof (such as Fab, Fab′, F(ab′)2, Fv), single chain (scFv), VHH, variants thereof, fusion proteins comprising an antigen-binding fragment of a monoclonal antibody, humanized monoclonal antibodies, chimeric monoclonal antibodies, and any other modified configuration of the immunoglobulin molecule that comprises an antigen-binding fragment (epitope recognition site) of the required specificity and the ability to bind to an epitope, including WNT surrogate molecules disclosed herein. It is not intended to be limited as regards the source of the antibody or the manner in which it is made (e.g., by hybridoma, phage selection, recombinant expression, transgenic animals, etc.). The term includes whole immunoglobulins as well as the fragments etc. described above under the definition of “antibody.”

[0045] The term “co-receptor” refers to a first cell surface receptor that binds signaling molecule or ligand in conjunction with another receptor to facilitate ligand recognition and initiate a biological process, such as WNT pathway signaling.

[0046] The term “agonist activity” refers to the ability of an agonist to mimic the effect or activity of a naturally occurring protein.

[0047] As used herein “peptide linker” or “linker moiety” refers to a sequence of sometimes repeating amino acid residues, usually glycine and serine, that are used to join the various antigen binding domains described below. The length of the linker sequence determines the flexibility of the antigen binding domains in MsAbs, in particular, in the binding of epitopes on co-receptors such as FZD receptors, LRP5 and/or LRP6, and/or ZNRF3/RNF43.

[0048] As used herein, the term “enhances” refers to a measurable increase in the level of receptor signaling modulated by a ligand or ligand agonist compared with the level in the absence of the agonist, e.g., a WNT surrogate molecule. In particular embodiments, the increase in the level of receptor signaling is at least 10%, at least 20%, at least 50%, at least two-fold, at least five-fold, at least 10-fold, at least 20-fold, at least 50-fold, or at least 100-fold as compared to the level of receptor signaling in the absence of the agonist, e.g., in the same cell type. In certain embodiments, a WNT super agonist molecule increases the level of receptor signaling to a greater degree than a corresponding WNT surrogate molecule comprising the same FZD binding domain and LRP5/6 binding domain, but lacking the E3 ligase binding domain, e.g., by at least 10%, at least 20%, at least 50%, or at least two-fold.

[0049] An antigen or epitope that “specifically binds” or “preferentially binds” (used interchangeably herein) to an antibody or antigen-binding fragment thereof is a term well understood in the art, and methods to determine such specific or preferential binding are also well known in the art. A molecule, e.g., a WNT surrogate molecule or WNT super agonist molecule, is said to exhibit “specific binding” or “preferential binding” if it reacts or associates more frequently, more rapidly, with greater duration and/or with greater affinity with a particular cell or substance than it does with alternative cells or substances. A molecule or binding region thereof, e.g., a WNT surrogate molecule or binding region thereof, “specifically binds” or “preferentially binds” to a target antigen, e.g., a FZD receptor, if it binds with greater affinity, avidity, more readily, and/or with greater duration than it binds to other substances. It is also understood by reading this definition that, for example, a surrogate molecule or binding region thereof that specifically or preferentially binds to a first target may or may not specifically or preferentially bind to a second target. As such, “specific binding” or “preferential binding” does not necessarily require (although it can include) exclusive binding. Generally, but not necessarily, reference to binding means preferential binding.

[0050] The term “operably linked” means that the components to which the term is applied are in a relationship that allows them to carry out their inherent functions under suitable conditions. For example, a transcription control sequence “operably linked” to a protein coding sequence is ligated thereto so that expression of the protein coding sequence is achieved under conditions compatible with the transcriptional activity of the control sequences.

[0051] The term “control sequence” as used herein refers to polynucleotide sequences that can affect expression, processing or intracellular localization of coding sequences to which they are ligated or operably linked. The nature of such control sequences may depend upon the host organism. In particular embodiments, transcription control sequences for prokaryotes may include a promoter, ribosomal binding site, and transcription termination sequence. In other particular embodiments, transcription control sequences for eukaryotes may include promoters comprising one or a plurality of recognition sites for transcription factors, transcription enhancer sequences, transcription termination sequences and polyadenylation sequences. In certain embodiments, “control sequences” can include leader sequences and/or fusion partner sequences.

[0052] The term “polynucleotide” as referred to herein means single-stranded or double-stranded nucleic acid polymers. In certain embodiments, the nucleotides comprising the polynucleotide can be ribonucleotides or deoxyribonucleotides or a modified form of either type of nucleotide. Said modifications include base modifications such as bromouridine, ribose modifications such as arabinoside and 2′,3′-dideoxyribose and internucleotide linkage modifications such as phosphorothioate, phosphorodithioate, phosphoroselenoate, phosphorodiselenoate, phosphoroanilothioate, phoshoraniladate and phosphoroamidate. The term “polynucleotide” specifically includes single and double stranded forms of DNA.

[0053] The term “naturally occurring nucleotides” includes deoxyribonucleotides and ribonucleotides. The term “modified nucleotides” includes nucleotides with modified or substituted sugar groups and the like. The term “oligonucleotide linkages” includes oligonucleotide linkages such as phosphorothioate, phosphorodithioate, phosphoroselenoate, phosphorodiselenoate, phosphoroanilothioate, phoshoraniladate, phosphoroamidate, and the like. See, e.g., LaPlanche et al. (1986) Nucl. Acids Res. 14:9081; Stec et al. (1984) J. Am. Chem. Soc. 106:6077; Stein et al. (1988) Nucl. Acids Res. 16:3209; Zon et al. (1991) Anti- Cancer Drug Design, 6:539; Zon et al. (1991) Oligonucleotides and Analogues: A Practical Approach, pp. 87-108 (F. Eckstein, Ed.), Oxford University Press, Oxford England; Stec et al., U.S. Pat. No. 5,151,510; Uhlmann and Peyman (1990) Chem. Rev. 90:543, the disclosures of which are hereby incorporated by reference for any purpose. An oligonucleotide can include a detectable label to enable detection of the oligonucleotide or hybridization thereof.

[0054] The term “vector” is used to refer to any molecule (e.g., nucleic acid, plasmid, or virus) used to transfer coding information to a host cell. The term “expression vector” refers to a vector that is suitable for transformation of a host cell and contains nucleic acid sequences that direct and/or control expression of inserted heterologous nucleic acid sequences. Expression includes, but is not limited to, processes such as transcription, translation, and RNA splicing, if introns are present.

[0055] The term “host cell” is used to refer to a cell into which has been introduced, or which is capable of having introduced into it, a nucleic acid sequence encoding one or more of the herein described polypeptides, and which further expresses or is capable of expressing a selected gene of interest, such as a gene encoding any herein described polypeptide. The term includes the progeny of the parent cell, whether or not the progeny are identical in morphology or in genetic make-up to the original parent, so long as the selected gene is present. Accordingly there is also contemplated a method comprising introducing such nucleic acid into a host cell. The introduction may employ any available technique. For eukaryotic cells, suitable techniques may include calcium phosphate transfection, DEAE-Dextran, electroporation, liposome-mediated transfection and transduction using retrovirus or other virus, e.g. vaccinia or, for insect cells, baculovirus.

[0056] For bacterial cells, suitable techniques may include calcium chloride transformation, electroporation and transfection using bacteriophage. The introduction may be followed by causing or allowing expression from the nucleic acid, e.g. by culturing host cells under conditions for expression of the gene. In one embodiment, the nucleic acid is integrated into the genome (e.g. chromosome) of the host cell. Integration may be promoted by inclusion of sequences which promote recombination with the genome, in accordance-with standard techniques.

[0057] “Transduction” also refers to the acquisition and transfer of eukaryotic cellular sequences by retroviruses. The term “transfection” is used to refer to the uptake of foreign or exogenous DNA by a cell, and a cell has been “transfected” when the exogenous DNA has been introduced inside the cell membrane. A number of transfection techniques are well known in the art and are disclosed herein. See, e.g., Graham et al., 1973, Virology 52:456; Sambrook et al., 2001, MOLECULAR CLONING, A LABORATORY MANUAL, Cold Spring Harbor Laboratories; Davis et al., 1986, BASIC METHODS IN MOLECULAR BIOLOGY, Elsevier; and Chu et al., 1981, Gene 13:197. Such techniques can be used to introduce one or more exogenous DNA moieties into suitable host cells.

[0058] The term “transformation” as used herein refers to a change in a cell's genetic characteristics, and a cell has been transformed when it has been modified to contain a new DNA. For example, a cell is transformed where it is genetically modified from its native state. Following transfection or transduction, the transforming DNA may recombine with that of the cell by physically integrating into a chromosome of the cell, or may be maintained transiently as an episomal element without being replicated, or may replicate independently as a plasmid. A cell is considered to have been stably transformed when the DNA is replicated with the division of the cell.

[0059] The term “naturally occurring” or “native” when used in connection with biological materials such as nucleic acid molecules, polypeptides, host cells, and the like, refers to materials which are found in nature and are not manipulated by a human. Similarly, “non-naturally occurring” or “non-native” as used herein refers to a material that is not found in nature or that has been structurally modified or synthesized by a human.

[0060] The terms “polypeptide” “protein” and “peptide” and “glycoprotein” are used interchangeably and mean a polymer of amino acids not limited to any particular length. The term does not exclude modifications such as myristylation, sulfation, glycosylation, phosphorylation and addition or deletion of signal sequences. The terms “polypeptide” or “protein” means one or more chains of amino acids, wherein each chain comprises amino acids covalently linked by peptide bonds, and wherein said polypeptide or protein can comprise a plurality of chains non-covalently and/or covalently linked together by peptide bonds, having the sequence of native proteins, that is, proteins produced by naturally-occurring and specifically non-recombinant cells, or genetically-engineered or recombinant cells, and comprise molecules having the amino acid sequence of the native protein, or molecules having deletions from, additions to, and/or substitutions of one or more amino acids of the native sequence. The terms “polypeptide” and “protein” specifically encompass WNT surrogate molecules, FZD binding regions thereof, LRP5/6 binding regions thereof, antibodies and antigen-binding fragments thereof that bind to a FZD receptor or a LRP5 or LRP6 receptor disclosed herein, or sequences that have deletions from, additions to, and/or substitutions of one or more amino acid of any of these polypeptides. Thus, a “polypeptide” or a “protein” can comprise one (termed “a monomer”) or a plurality (termed “a multimer”) of amino acid chains.

[0061] The term “isolated protein,” “or “isolated antibody” referred to herein means that a subject protein, surrogate molecule, or antibody: (1) is free of at least some other proteins with which it would typically be found in nature; (2) is essentially free of other proteins from the same source, e.g., from the same species, (3) is expressed by a cell from a different species; (4) has been separated from at least about 50 percent of polynucleotides, lipids, carbohydrates, or other materials with which it is associated in nature; (5) is not associated (by covalent or noncovalent interaction) with portions of a protein with which the “isolated protein” is associated in nature; (6) is operably associated (by covalent or noncovalent interaction) with a polypeptide with which it is not associated in nature; or (7) does not occur in nature. Such an isolated protein can be encoded by genomic DNA, cDNA, mRNA or other RNA, or may be of synthetic origin, or any combination thereof. In certain embodiments, an isolated protein may comprise naturally-occurring and/or artificial polypeptide sequences. In certain embodiments, the isolated protein is substantially free from proteins or polypeptides or other contaminants that are found in its natural environment that would interfere with its use (therapeutic, diagnostic, prophylactic, research or otherwise).

[0062] A “WNT super agonist” is a molecule having enhanced WNT agonist activity. As used herein, the WNT super agonists have both WNT signaling and WNT signal enhancing activity. In some embodiments, the WNT super agonist molecule will bind both at least one FZD receptor and at least one LRP receptor, as well as binding and activating at least one E3 ubiquitin ligase receptor, thereby stabilizing the FZD and/or LRP receptors.

### II. General

[0063] The present invention provides combinations of antigen binding molecules that act as WNT super agonist, WNT surrogate and WNT enhancing (RSPO mimetic) molecules by binding to and modulating co-receptor signaling, for example, antigen binding molecules that bind to one or more FZD receptor and one or more LRP5 or LRP6 receptor, and one or more ZNRF3/RNF43 E3 ubiquitin ligase molecules, which in turn modulate a downstream WNT signaling pathway, and methods of preparation and use thereof. In particular embodiments, the surrogate molecules activate or increase a signaling pathway associated with one or both of the co-receptors.

[0064] In particular embodiments, the WNT super agonist molecules disclosed herein comprise: (i) one or more antibodies or antigen-binding fragments thereof that specifically bind to one or more first co-receptor, including antibodies or antigen-binding fragments thereof having particular co-receptor specificity and/or functional properties; (ii) one or more antibodies or antigen-binding fragments thereof that specifically bind to one or more second co-receptors; and (iii) one or more polypeptides (e.g., a mutated R-spondin) that specifically bind to one or more E3 ligase, e.g., ZNRF3 and/or RNF43. Certain embodiments encompass specific structural formats or arrangements of the first and second co-receptor binding region(s) of the WNT super agonist molecules advantageous in increasing downstream signaling and related biological effects.

[0065] In particular embodiments, the WNT surrogate molecules disclosed herein comprise: (i) one or more antibodies or antigen-binding fragments thereof that specifically bind to one or more first co-receptor, including antibodies or antigen-binding fragments thereof having particular co-receptor specificity and/or functional properties; and (ii) one or more antibodies or antigen-binding fragments thereof that specifically bind to one or more second co-receptors. Certain embodiments encompass specific structural formats or arrangements of the first and second co-receptor binding region(s) of the WNT surrogate molecules advantageous in increasing downstream signaling and related biological effects.

[0066] In particular embodiments, the WNT enhancer molecules (also referred to as RSPO mimetics) disclosed herein comprise: (i) one or more antibodies or antigen-binding fragments thereof that specifically bind to one or more first co-receptor (either one or more FZD or LRP5/6), including antibodies or antigen-binding fragments thereof having particular co-receptor specificity and/or functional properties; (ii) one or more polypeptides (e.g., a mutated R-spondin) that specifically bind to one or more E3 ligase, e.g., ZNRF3 and/or RNF43. Certain embodiments encompass specific structural formats or arrangements of the first and second co-receptor binding region(s) of the WNT super agonist molecules advantageous in increasing downstream signaling and related biological effects. In particular embodiments, the WNT enhancer molecules do not bind to both a FZD receptor and an LRP5/6.

[0067] The practice of the present invention will employ, unless indicated specifically to the contrary, conventional methods of virology, immunology, microbiology, molecular biology and recombinant DNA techniques within the skill of the art, many of which are described below for the purpose of illustration. Such techniques are explained fully in the literature. See, e.g., Current Protocols in Molecular Biology or Current Protocols in Immunology, John Wiley & Sons, New York, N.Y. (2009); Ausubel et al., Short Protocols in Molecular Biology, 3rd ed., Wiley & Sons, 1995; Sambrook and Russell, Molecular Cloning: A Laboratory Manual (3rd Edition, 2001); Maniatis et al. Molecular Cloning: A Laboratory Manual (1982); DNA Cloning: A Practical Approach, vol. I & II (D. Glover, ed.); Oligonucleotide Synthesis (N. Gait, ed., 1984); Nucleic Acid Hybridization (B. Hames & S. Higgins, eds., 1985); Transcription and Translation (B. Hames & S. Higgins, eds., 1984); Animal Cell Culture (R. Freshney, ed., 1986); Perbal, A Practical Guide to Molecular Cloning (1984) and other like references.

[0068] Sequences of illustrative antibodies, or antigen-binding fragments, or complementarity determining regions (CDRs) thereof, that bind to one or more FZD receptors, are set forth in WO2019126399. Sequences of illustrative LRP5 and/or LRP6 antibodies, or antigen-binding fragments, or complementarity determining regions (CDRs) thereof, are set forth in WO2019126401. Sequences of antigen binding molecules that bind one or more FZD receptor and LRP5 and/or LRP6 are set forth in U.S. Provisional application Nos. 62/607,875, 62/641,217, and 62/680,522, titled WNT Signaling Pathway Agonists, filed Dec. 19, 2017, Mar. 9, 2018, and Jun. 4, 2018, respectively.

[0069] Antibodies and antibody fragments thereof may be prepared by methods well known in the art. For example, the proteolytic enzyme papain preferentially cleaves IgG molecules to yield several fragments, two of which (the F(ab) fragments) each comprise a covalent heterodimer that includes an intact antigen-binding site. The enzyme pepsin is able to cleave IgG molecules to provide several fragments, including the F(ab′)2 fragment which comprises both antigen-binding sites. An Fv fragment for use according to certain embodiments of the present invention can be produced by preferential proteolytic cleavage of an IgM, and on rare occasions of an IgG or IgA immunoglobulin molecule. Fv fragments are, however, more commonly derived using recombinant techniques known in the art. The Fv fragment includes a non-covalent VH:VL heterodimer including an antigen-binding site which retains much of the antigen recognition and binding capabilities of the native antibody molecule. (See, e.g., Inbar et al. (1972) Proc. Nat. Acad. Sci. USA 69:2659-2662; Hochman et al. (1976) Biochem 15:2706-2710; and Ehrlich et al. (1980) Biochem 19:4091-4096).

[0070] In certain embodiments, single chain Fv or scFV antibodies are contemplated. For example, Kappa bodies (Ill et al. (1997), Prot. Eng. 10: 949-57; minibodies (Martin et al. (1994) EMBO J 13: 5305-9; diabodies (Holliger et al. (1993) PNAS 90: 6444-8; or janusins (Traunecker et al. (1991) EMBO J 10: 3655-59; and Traunecker et al. (1992) Int. J. Cancer Suppl. 7: 51-52), may be prepared using standard molecular biology techniques following the teachings of the present application with regard to selecting antibodies having the desired specificity. In still other embodiments, bispecific or chimeric antibodies may be made that encompass the ligands of the present disclosure. For example, a chimeric antibody may comprise CDRs and framework regions from different antibodies, while bispecific antibodies may be generated that bind specifically to one or more FZD receptor through one binding domain and to a second molecule through a second binding domain. These antibodies may be produced through recombinant molecular biological techniques or may be physically conjugated together.

[0071] A single chain Fv (scFv) polypeptide is a covalently linked VH::VL heterodimer which is expressed from a gene fusion including VH- and VL-encoding genes linked by an encoded peptide linker. Huston et al. (1988) Proc. Nat. Acad. Sci. USA 85(16):5879-5883. A number of methods have been described to discern chemical structures for converting the naturally aggregated—but chemically separated-light and heavy polypeptide chains from an antibody V region into an scFv molecule which will fold into a three dimensional structure substantially similar to the structure of an antigen-binding site. See, e.g., U.S. Pat. Nos. 5,091,513 and 5,132,405, to Huston et al.; and U.S. Pat. No. 4,946,778, to Ladner et al.

[0072] In certain embodiments, an antibody as described herein is in the form of a diabody. Diabodies are multimers of polypeptides, each polypeptide comprising a first domain comprising a binding region of an immunoglobulin light chain and a second domain comprising a binding region of an immunoglobulin heavy chain, the two domains being linked (e.g. by a peptide linker) but unable to associate with each other to form an antigen binding site: antigen binding sites are formed by the association of the first domain of one polypeptide within the multimer with the second domain of another polypeptide within the multimer (WO94/13804). A dAb fragment of an antibody consists of a VH domain (Ward, E. S. et al. (1989) Nature 341:544-546).

[0073] Where bispecific antibodies are to be used, these may be conventional bispecific antibodies, which can be manufactured in a variety of ways (Holliger, P. and Winter G. (1993) Curr. Op. Biotechnol. 4:446-449), e.g. prepared chemically or from hybrid hybridomas, or may be any of the bispecific antibody fragments mentioned above. Diabodies and scFv can be constructed without an Fc region, using only variable domains, potentially reducing the effects of anti-idiotypic reaction.

[0074] Bispecific diabodies, as opposed to bispecific whole antibodies, may also be particularly useful because they can be readily constructed and expressed in E. coli. Diabodies (and many other polypeptides such as antibody fragments) of appropriate binding specificities can be readily selected using phage display (WO94/13804) from libraries. If one arm of the diabody is to be kept constant, for instance, with a specificity directed against antigen X, then a library can be made where the other arm is varied and an antibody of appropriate specificity selected. Bispecific whole antibodies may be made by knobs-into-holes engineering (J. B. B. Ridgeway et al. (1996) Protein Eng., 9:616-621).

[0075] In certain embodiments, the antibodies described herein may be provided in the form of a UniBody®. A UniBody® is an IgG4 antibody with the hinge region removed (see GenMab Utrecht, The Netherlands; see also, e.g., US20090226421). This proprietary antibody technology creates a stable, smaller antibody format with an anticipated longer therapeutic window than current small antibody formats. IgG4 antibodies are considered inert and thus do not interact with the immune system. Fully human IgG4 antibodies may be modified by eliminating the hinge region of the antibody to obtain half-molecule fragments having distinct stability properties relative to the corresponding intact IgG4 (GenMab, Utrecht). Halving the IgG4 molecule leaves only one area on the UniBody® that can bind to cognate antigens (e.g., disease targets) and the UniBody® therefore binds univalently to only one site on target cells.

[0076] In certain embodiments, the antibodies of the present disclosure may take the form of a single variable domain fragment known as a VHH. The VHH technology was originally developed following the discovery and identification that camelidae (e.g., camels and llamas) possess fully functional antibodies that consist of heavy chains only and therefore lack light chains. These heavy-chain only antibodies contain a single VHH domain and two constant domains (CH2, CH3). The cloned and isolated VHH domains have full antigen binding capacity and are very stable. These VHH domains are encoded by single genes and are efficiently produced in almost all prokaryotic and eukaryotic hosts e.g. E. coli (see e.g. U.S. Pat. No. 6,765,087), molds (for example Aspergillus or Trichoderma) and yeast (for example Saccharomyces, Kluyvermyces, Hansenula or Pichia (see e.g. U.S. Pat. No. 6,838,254). The production process is scalable and multi-kilogram quantities of VHHs have been produced. VHHs may be formulated as a ready-to-use solution having a long shelf life. The Nanoclone® method (see, e.g., WO 06/079372) is a proprietary method for generating VHHs against a desired target, based on automated high-throughput selection of B-cells. VHH antibodies typically have a small size of around 15 kDa.

[0077] In certain embodiments, the antibodies or antigen-binding fragments thereof as disclosed herein are humanized. This refers to a chimeric molecule, generally prepared using recombinant techniques, having an antigen-binding site derived from an immunoglobulin from a non-human species and the remaining immunoglobulin structure of the molecule based upon the structure and/or sequence of a human immunoglobulin. The antigen-binding site may comprise either complete variable domains fused onto constant domains or only the CDRs grafted onto appropriate framework regions in the variable domains. Epitope binding sites may be wild type or modified by one or more amino acid substitutions. This eliminates the constant region as an immunogen in human individuals, but the possibility of an immune response to the foreign variable region remains (LoBuglio, A. F. et al., (1989) Proc Natl Acad Sci USA 86:4220-4224; Queen et al. (1988) Proc Natl Acad Sci USA 86:10029-10033; and Riechmann et al. (1988) Nature 332:323-327). Illustrative methods for humanization of the anti-FZD antibodies disclosed herein include the methods described in U.S. Pat. No. 7,462,697.

[0078] Another approach focuses not only on providing human-derived constant regions, but modifying the variable regions as well so as to reshape them as closely as possible to human form. It is known that the variable regions of both heavy and light chains contain three complementarity-determining regions (CDRs) which vary in response to the epitopes in question and determine binding capability, flanked by four framework regions (FRs) which are relatively conserved in a given species and which putatively provide a scaffolding for the CDRs. When nonhuman antibodies are prepared with respect to a particular epitope, the variable regions can be “reshaped” or “humanized” by grafting CDRs derived from nonhuman antibody on the FRs present in the human antibody to be modified. Application of this approach to various antibodies has been reported by Sato, K., et al., (1993) Cancer Res 53:851-856. Riechmann, L., et al., (1988) supra; Verhoeyen, M., et al., (1988) Science 239:1534-1536; Kettleborough, C. A., et al., (1991) Protein Engg 4:773-3783; Maeda, H., et al., (1991) Human Antibodies Hybridoma 2:124-134; Gorman, S. D., et al., (1991) Proc Nat!AcadSci USA 88:4181-4185; Tempest, P. R., et al., (1991) Bio Technol. 9:266-271; Co, M. S., et al., (1991) Proc Natl Acad Sci USA 88:2869-2873; Carter, P., et al., (1992) Proc Natd Acad Sci USA 89:4285-4289; and Co, M. S. et al., (1992) J Immunol 148:1149-1154. In some embodiments, humanized antibodies preserve all CDR sequences (for example, a humanized mouse antibody which contains all six CDRs from the mouse antibodies). In other embodiments, humanized antibodies have one or more CDRs (one, two, three, four, five, six) which are altered with respect to the original antibody, which are also termed one or more CDRs “derived from” one or more CDRs from the original antibody.

[0079] In certain embodiments, the antibodies of the present disclosure may be chimeric antibodies. In this regard, a chimeric antibody is comprised of an antigen-binding fragment of an antibody operably linked or otherwise fused to a heterologous Fc portion of a different antibody. In certain embodiments, the heterologous Fc domain is of human origin. In other embodiments, the heterologous Fc domain may be from a different Ig class from the parent antibody, including IgA (including subclasses IgA1 and IgA2), IgD, IgE, IgG (including subclasses IgG1, IgG2, IgG3, and IgG4), and IgM. In further embodiments, the heterologous Fc domain may be comprised of CH2 and CH3 domains from one or more of the different Ig classes. As noted above with regard to humanized antibodies, the antigen-binding fragment of a chimeric antibody may comprise only one or more of the CDRs of the antibodies described herein (e.g., 1, 2, 3, 4, 5, or 6 CDRs of the antibodies described herein), or may comprise an entire variable domain (VL, VH or both).

### III. Structures of Receptor Surrogate Ligands (WNT Surrogate Molecules)

[0080] The disclosure provides, in certain aspects, surrogate molecules that bind both one or more of a first receptor (e.g., FZD) and one or more of a second receptor (e.g., LRP5 and/or LRP6; also referred to as LRP5/6). For example, a WNT surrogate molecule can bind one or more human FZD receptors and one or both of a human LRP5 and/or a human LRP6.

[0081] In certain embodiments, a surrogate molecule is capable of modulating or modulates signaling events associated with at least one of the co-receptors that it binds, in a cell contacted with the surrogate molecule. In certain embodiments, the surrogate molecule increases receptor signaling. As an example, a WNT surrogate molecule specifically modulates the biological activity of a human WNT/β-catenin signaling pathway.

[0082] Surrogate molecules of the present invention are biologically active in binding to one or more of a first receptor and to one or more of a second receptor, and as an example, in the activation of WNT signaling, the WNT surrogate molecule is a WNT agonist. The term “agonist activity” refers to the ability of an agonist to mimic the effect or activity of a naturally occurring protein binding to a first and second receptor. The ability of the surrogate molecules and other receptor agonists disclosed herein to mimic the activity of the natural ligand can be confirmed by a number of assays. As an example, WNT surrogate molecules, some of which are disclosed herein activate, enhance or increase the canonical WNT/0-catenin signaling pathway.

[0083] In particular embodiments, the structures of the surrogate molecules disclosed herein are bispecific, i.e., they specifically bind to two or more different epitopes, e.g., one or more epitopes of a first receptor, and one or more epitopes of a second receptor.

[0084] In particular embodiments, WNT surrogate molecules disclosed herein are multivalent, e.g., they comprise two or more regions that each specifically bind to the same epitope, e.g., two or more regions that bind to an epitope within one or more first co-receptor and/or two or more regions that bind to an epitope within a second co-receptor. In particular embodiments, they comprise two or more regions that bind to an epitope within a first co-receptor and two or more regions that bind to an epitope within a second co-receptor. In certain embodiments, surrogate molecules comprise a ratio of the number of regions that bind one or more first co-receptor to the number of regions that a second co-receptor of or about: 1:1, 2:1, 3:1, 4:1, 5:1, 6:1, 2:3, 2:5, 2:7, 7:2, 5:2, 3:2, 3:4, 3:5, 3:7, 3:8, 8:3, 7:3, 5:3, 4:3, 4:5, 4:7, 4:9, 9:4, 7:4, 5:4, 6:7, 7:6, 1:2, 1:3, 1:4, 1:5, or 1:6. In certain embodiments, the surrogate molecules are bispecific and multivalent.

[0085] The structures of the WNT surrogate molecules disclosed herein may have any of a variety of different structural formats or configurations. The surrogate molecules may comprise polypeptides and/or non-polypeptide binding moieties, e.g., small molecules. In particular embodiments, the surrogate molecules comprise both a polypeptide region and a non-polypeptide binding moiety. In certain embodiments, the surrogate molecules may comprise a single polypeptide, or they may comprise two or more, three or more, or four or more polypeptides. In certain embodiments, one or more polypeptides of a surrogate molecule are antibodies or antigen-binding fragments thereof. In certain embodiments, surrogates comprise two antibodies or antigen binding fragments thereof, one that binds one or more first co-receptor and one that binds on or more second co-receptor. In certain embodiments, the surrogates comprises one, two, three, or four polypeptides, e.g., linked or bound to each other or fused to each other. Non-limiting examples of WNT surrogate structures contemplated by the disclosure are provided in FIG. 7.

[0086] When the surrogate molecules comprise a single polypeptide, they may be a fusion protein comprising one or more first co-receptor binding domain and one or more second co-receptor binding domain. The binding domains may be directly fused or they may be connected via a linker, e.g., a polypeptide linker, including but not limited to any of those disclosed herein.

[0087] When the surrogate molecules comprise two or more polypeptides, the polypeptides may be linked via covalent bonds, such as, e.g., disulfide bonds, and/or noncovalent interactions. For example, heavy chains of human immunoglobulin IgG interact at the level of their CH3 domains directly, whereas, at the level of their CH2 domains, they interact via the carbohydrate attached to the asparagine (Asn) N84.4 in the DE turn. In particular embodiments, the surrogate molecules comprise one or more regions derived from an antibody or antigen-binding fragment thereof, e.g., antibody heavy chains or antibody light chains or fragments thereof. In certain embodiments, a surrogate polypeptide comprises two antibody heavy chain regions (e.g., hinge regions) bound together via one or more disulfide bond. In certain embodiments, a surrogate polypeptide comprises an antibody light chain region (e.g., a CL region) and an antibody heavy chain region (e.g., a CH1 region) bound together via one or more disulfide bond.

[0088] Surrogate polypeptides may be engineered to facilitate binding between two polypeptides. For example, Knob-into-holes amino acid modifications may be introduced into two different polypeptides to facilitate their binding. Knobs-into-holes amino acid (AA) changes is a rational design strategy developed in antibody engineering, used for heterodimerization of the heavy chains, in the production of bispecific IgG antibodies. AA changes are engineered in order to create a knob on the CH3 of the heavy chains from a first antibody and a hole on the CH3 of the heavy chains of a second antibody. The knob may be represented by a tyrosine (Y) that belongs to the ‘very large’ IMGT volume class of AA, whereas the hole may be represented by a threonine (T) that belongs to the ‘small’ IMGT volume class. Other means of introducing modifications into polypeptides to facilitate their binding are known and available in the art. For example, specific amino acids may be introduced and used for cross-linking, such as Cysteine to form an intermolecular disulfide bond.

[0089] Surrogate molecules may have a variety of different structural formats, including but not limited to those as described in WO2019126398 and WO2020010308.

[0090] In one embodiment, a surrogate molecule comprises an scFv or antigen-binding fragment thereof fused to a VHH or antigen-binding fragment thereof. In certain embodiments, the scFv specifically binds one or more first receptor, and the VHH specifically binds to one or more second receptor. In certain embodiments, the scFv specifically binds LRP5 and/or LRP6, and the VHH specifically binds one or more FZD receptor. In particular embodiments, the scFv or antigen-binding fragment thereof is fused directly to the VHH or antigen-binding fragment thereof, whereas in other embodiments, the two binding regions are fused via a linker moiety. In particular embodiments, the VHH is fused or linked to the N-terminus of the scFV, while in other embodiments, the VHH is fused to the C-terminus of the scFv.

[0091] In various embodiments, including but not limited to those depicted in WO2019126398, WO2020010308, Table 3, Table 4, and FIGS. 1-8, a surrogate molecule comprises one or more Fab or antigen-binding fragment thereof and one or more VHH or antigen-binding fragment thereof (or alternatively, one or more scFv or antigen-binding fragment thereof). In certain embodiments, the Fab specifically binds one or more FZD receptor, and the VHH (or scFv) specifically binds LRP5 and/or LRP6. In certain embodiments, the Fab specifically binds LRP5 and/or LRP6, and the VHH (or scFv) specifically binds one or more FZD receptor. In certain embodiments, the VHH (or scFv) is fused to the N-terminus of the Fab, while in some embodiments, the VHH (or scFv) is fused to the C-terminus of the Fab. In particular embodiments, the Fab is present in a full IgG format, and the VHH (or scFv) is fused to the N-terminus and/or C-terminus of the IgG light chain. In particular embodiments, the Fab is present in a full IgG format, and the VHH (or scFv) is fused to the N-terminus and/or C-terminus of the IgG heavy chain. In particular embodiments, two or more VHHs (or scFvs) are fused to the IgG at any combination of these locations.

[0092] Fabs may be converted into a full IgG format that includes both the Fab and Fc fragments, for example, using genetic engineering to generate a fusion polypeptide comprising the Fab fused to an Fc region, i.e., the Fab is present in a full IgG format. The Fc region for the full IgG format may be derived from any of a variety of different Fcs, including but not limited to, a wild-type or modified IgG1, IgG2, IgG3, IgG4 or other isotype, e.g., wild-type or modified human IgG1, human IgG2, human IgG3, human IgG4, human IgG4Pro (comprising a mutation in core hinge region that prevents the formation of IgG4 half molecules), human IgA, human IgE, human IgM, or the modified IgG1 referred to as IgG1 LALAPG. The L235A, P329G (LALA-PG) variant has been shown to eliminate complement binding and fixation as well as Fc-7 dependent antibody-dependent cell-mediated cytotoxity (ADCC) in both murine IgG2a and human IgG1. These LALA-PG substitutions allow a more accurate translation of results generated with an “effectorless” antibody framework scaffold between mice and primates. In particular embodiments of any of the IgG disclosed herein, the IgG comprises one or more of the following amino acid substitutions: N297G, N297A, N297E, L234A, L235A, or P236G.

[0093] Non-limiting examples of bivalent and bispecific surrogate molecules of co-receptors that are bivalent towards both the one or more first receptor and one or more second receptor (e.g., FZD and LRP) are provided as the top four structures depicted in WO2019126398 and WO2020010308, where the VHH or scFv is depicted in white or grey, and the Fab or IgG is depicted in black. As shown, the VHH (or scFvs) may be fused to the N-termini of both light chains, to the N-termini of both heavy chains, to the C-termini of both light chains, or to the C-termini of both heavy chains. It is further contemplated, e.g., that VHH (or scFvs) could be fused to both the N-termini and C-termini of the heavy and/or light chains, to the N-termini of the light chains and the heavy chains, to the C-termini of the heavy and light chains, to the N-termini of the heavy chains and C-termini of the light chains, or to the C-termini of the heavy chains and the N-termini of the light chains. In other related embodiments, two or more VHH (or scFvs) may be fused together, optionally via a linker moiety, and fused to the Fab or IgG at one or more of these locations. In a related embodiment, the surrogate molecule has a Hetero-IgG format, whereas the Fab is present as a half antibody, and one or more VHH (or scFv) is fused to one or more of the N-terminus of the Fc, the N-terminus of the Fab, the C-terminus of the Fc, or the C-terminus of the Fab. A bispecific but monovalent to each receptor version of this format is depicted at FIG. 6. In certain embodiments, the Fab or antigen-binding fragment (or IgG) thereof is fused directly to the VHH (or scFv) or antigen-binding fragment thereof, whereas in other embodiments, the binding regions are fused via a linker moiety. In particular embodiments, the Fab is described herein or comprises any of the CDR sets described herein.

[0094] In various embodiments, including but not limited to those depicted in WO2019126398, WO2020010308, Table 3, Table 4, and FIGS. 1-8, an antigen binding molecule comprises one or more Fab or antigen-binding fragment thereof that binds one or more first receptor (e.g., FZD receptors) and one or more Fab or antigen-binding fragment thereof that binds to at least one or more second receptor (e.g., LRP5 and/or LRP6). In a particular embodiment, it comprises two Fab or antigen-binding fragments thereof that bind one or more first co-receptor and/or two Fab or antigen-binding fragments thereof that bind to one or more second co-receptor. In further embodiments, one or more of the Fab is present in a full IgG format, and in certain embodiments, both Fab are present in a full IgG format. In certain embodiments, the Fab in full IgG format specifically binds one or more first receptor (e.g., one or more FZD receptor), and the other Fab specifically binds at least one second receptor (e.g., LRP5 and/or LRP6). For example, the Fab specifically binds one or more FZD receptor, and the Fab in full IgG format specifically binds LRP5 and/or LRP6. In certain embodiments, the Fab specifically binds LRP5 and/or LRP6, and the Fab in full IgG format specifically binds one or more FZD receptor. In certain embodiments, the Fab is fused to the N-terminus of the IgG, e.g., to the heavy chain or light chain N-terminus, optionally via a linker. In certain embodiments, the Fab is fused to the N-terminus of the heavy chain of the IgG and not fused to the light chain. In particular embodiments, the two heavy chains can be fused together directly or via a linker. An example of such a bispecific and bivalent with respect to both receptors is shown in FIG. 1A. In other related embodiments, two or more VHHs may be fused together, optionally via a linker moiety, and fused to the Fab or IgG at one or more of these locations. In a related embodiment, the WNT surrogate molecule has a Hetero-IgG format, whereas one of the Fab is present as a half antibody, and the other Fab is fused to one or more of the N-terminus of the Fc, the N-terminus of the Fab, or the C-terminus of the Fc. A bispecific but monovalent to each receptor version of this format is depicted at FIG. 6. In certain embodiments, the Fab or antigen-binding fragment thereof is fused directly to the other Fab or IgG or antigen-binding fragment thereof, whereas in other embodiments, the binding regions are fused via a linker moiety. In particular embodiments, the one or both of the two Fabs are described herein or comprise any of the CDR sets described herein.

[0095] In certain embodiments, the antigen binding molecules have a format as described in PCT Application Publication No. WO2017/136820, e.g., a Fabs-in-tandem IgG (FIT-IG) format. Shiyong Gong, Fang Ren, Danqing Wu, Xuan Wu & Chengbin Wu (2017). FIT-IG also include the formats disclosed in, e.g., Gong, et al (2017) mAbs 9:118-1128. In certain embodiments, FIT-IGs combine the functions of two antibodies into one molecule by re-arranging the DNA sequences of two parental monoclonal antibodies into two or three constructs and co-expressing them in mammalian cells. Examples of FIT-IG formats and constructs are provided in FIGS. 1A and 1B and FIGS. 2A and 2B of PCT Application Publication No. WO2017/136820. In certain embodiments, FIT-IGs require no Fc mutation; no scFv elements; and no linker or peptide connector. The Fab-domains in each arm work “in tandem” forming a tetravalent bi-specific antibody with four active and independent antigen binding sites that retain the biological function of their parental antibodies In particular embodiments, WNT surrogates comprises a Fab and an IgG. In certain embodiments, the Fab binder LC is fused to the HC of the IgG, e.g., by a linker of various length in between. In various embodiment, the Fab binder HC can be fused or unfused to the LC of the IgG. A variation of this format has been called Fabs-in-tandem IgG (or FIT-Ig).

[0096] In certain embodiments, the WNT surrogate molecules have a format described in PCT Application Publication No. WO2009/080251 (Klein et al.), e.g. a CrossMab format. CrossMabs formats are also described in Schaefer et al. (2011) Proc. Natl. Acad. Sci USA 108:11187-11192. The CrossMab format allows correct assembly of two heavy chains and two light chains derived from existing antibodies to form a bispecific, bivalent IgG antibodies. The technology is based on the cross over the antibody domain within one Fab-arm of a bispecific IgG antibody in order to enable correct chain association. Various portions of the Fab can be exchanged, e.g., the entire Fab, the variable heavy and light chains, or the CH1-CL chains can be exchanged.

[0097] In further embodiments of the present invention, the FiT-Ig and CrossMab technologies are combined to create a multispecific, multivalent antigen binding molecule, Cross-FiT, as depicted in FIG. 1A and Table 2. Also contemplated is a linker between the crossed CL domain of the Fab and the Ig domains rather than between the CH1 and Ig domains. Additional antigen binding fragments, e.g., Fabs, VHH/sdAbs, and/or scFvs, can be appended to the Cross-FiT structure at various sites, e.g., the heavy or light chains and/or the C-terminus of the Fc domain to create multispecific antibodies.

[0098] In particular embodiments, surrogate molecules comprise two or more VHHs/sdAbs (or scFvs), including at least one that binds one or more first receptor and at least one that binds at least one second receptor. In certain embodiments, one of the binding regions is a VHH/sdAbs and the other is an scFv. Surrogate molecules comprising two or more VHH/sdAbs (or scFvs) may be formatted in a variety of configurations, including but not limited to those depicted in WO2019126398 and WO2020010308. In certain bispecific, bivalent formats, two or more VHH/sdAbs (or scFvs) are fused in tandem or fused to two different ends of an Fc, optionally via one or more linkers. Where linkers are present, the linker and its length may be the same or different between the VHH/sdAb (or scFv) and the other VHH/sdAb (or scFv), or between the VHH and Fc. For example, in certain embodiments, the VHH/sdAb is fused to the N-terminus, at either the heavy or light chain, and/or C-terminus of the IgG heavy chain. In particular embodiments, two or more VHH/sdAbs are fused to the IgG at any combination of these locations. In various embodiments, both VHH/sdAbs may be fused to the N-termini of the Fc, to the C-termini of the Fc, or one or more VHH/sdAb may be fused to either or both of an N-terminus or C-terminus of the Fc. In a related embodiment, the surrogate molecule has a Hetero-IgG format, whereas one VHH/sdAb is present as a half antibody, and the other is fused to the N-terminus of the Fc or the C-terminus of the Fc. In certain embodiments, the VHH/sdAb is fused directly to the other VHH/sdAb whereas in other embodiments, the binding regions are fused via a linker moiety. In particular embodiments, the VHH/sdAb are described herein or comprises any of the CDR sets described herein. In various embodiments, any of these formats may comprise one or more scFvs in place of one or more VHH/sdAbs.

[0099] In certain embodiments, a surrogate molecule is formatted as a diabody. The binders against the two co-receptors can also be linked together in a diabody (or DART) configuration. The diabody can also be in a single chain configuration. If the diabody is fused to an Fc, this will create a bivalent bispecific format. Without fusion to Fc, this would be a monovalent bispecific format. In certain embodiments, a diabody is a noncovalent dimer scFv fragment that consists of the heavy-chain variable (VH) and light-chain variable (VL) regions connected by a small peptide linker. Another form of diabody is a single-chain (Fv)2 in which two scFv fragments are covalently linked to each other.

[0100] As discussed, the surrogate molecules, in various embodiments, comprise one or more antibodies or antigen-binding fragments thereof disclosed herein. Thus, in particular embodiments, the surrogate comprises two polypeptides, wherein each polypeptide comprises an Nab or scFv that binds at least one first co-receptor and an Nab or scFv that binds at least one second co-receptor, optionally wherein one of the binding domains is an scFv and the other is an Nab. In certain embodiments, a surrogate comprises three polypeptides, wherein the first polypeptide comprises an antibody heavy chain and the second polypeptide comprises an antibody light chain, wherein the antibody heavy chain and light chain bind either receptor, and wherein the third polypeptide comprises a VHH/sdAb fused to a heavy chain Fc region or the light chain of the antibody, wherein the VHH/sdAb binds to either co-receptor. In other embodiments, the surrogates comprise four polypeptides, including two heavy chain polypeptides and two light chain polypeptides, wherein the two heavy chains and two light chains bind one or more first receptor, and further comprise one or more VHH/sdAb or scFv fused to one or more of the heavy chains and/or light chains, wherein the VHH/sdAb or scFv binds to one or more second co-receptor. In an illustrative embodiment, a WNT surrogate comprises at least four polypeptides, including two heavy chain polypeptides and two light chain polypeptides that bind either LRP5/6 or one or more FZDs, wherein the WNT surrogate further comprises a Fab that binds either LRP5/6 or one or more FZDs. For example, the Fab may comprise two polypeptides, each fused to one of the two heavy chain polypeptides, and two polypeptides, each fused to one of the two light chain polypeptides, or it may comprise two polypeptides each fused to one of the two heavy chain polypeptides and two additional polypeptides, each bound to one of the two polypeptides fused to the heavy chain polypeptides, thus making a second Fab. Other configurations disclosed herein may be used to produce different surrogate molecules.

[0101] Also contemplated are Ig molecules where the VL and VH domains of one Ig are appended with the VL and VH domains of a second antibody. This format is call Fv-Ig or 2Fv-Ig for a homodimer. The VL and VH domains from the second Ig are appended to the N-terminus of the VL and VH domains of the first Ig via short peptide linkers. This format preserves the natural antibody's avidity to cell surface receptors or to more than one receptor or co-receptor complexes (see, e.g., Wu, et al (2007) Nature Biotechnol. 25:1290-1297)

[0102] In certain embodiments, the antigen binding formats are surrogate molecules that comprise one or more polypeptides comprising two or more binding regions. For illustrative purposes, the two or more binding regions may be a first receptor binding regions or a second receptor binding regions, or they may comprise one or more first receptor binding region and one or more second receptor binding region. The binding regions may be directly joined or contiguous, or may be separated by a linker, e.g. a polypeptide linker, or a non-peptidic linker, etc. The length of the linker, and therefore the spacing between the binding domains can be used to modulate the signal strength, and can be selected depending on the desired use of the surrogate molecule. The enforced distance between binding domains can vary, but in certain embodiments may be less than about 100 angstroms, less than about 90 angstroms, less than about 80 angstroms, less than about 70 angstroms, less than about 60 angstroms, or less than about 50 angstroms. In some embodiments the linker is a rigid linker, in other embodiments the linker is a flexible linker. In certain embodiments where the linker is a peptide linker, it may be from about 1-30 amino acids in length, about 5-15 amino acids in length, or about 1, 2, 3, 4, 5, 6, 7, 8, 9, 10, 11, 12, 13, 14, 15, 16, 17, 18, 19, 20 21, 22, 23, 24, 25, 26, 27, 28, 29, 30 or more amino acids in length, and is of sufficient length and amino acid composition to enforce the distance between binding domains. In some embodiments, the linker comprises or consists of one or more glycine and/or serine residues.

[0103] The surrogate molecule can be multimerized, e.g. through an Fc domain, by concatenation, coiled coils, polypeptide zippers, biotin/avidin or streptavidin multimerization, and the like. The surrogate molecules can also be joined to a moiety such as PEG, Fc, etc., as known in the art to enhance stability in vivo.

[0104] In certain embodiments, a surrogate molecule enhances or increases the co-receptors pathway signaling, e.g., in the case of WNT—β-catenin signaling, by at least 30%, 35%, 40%, 45%, 50%, 60%, 70%, 75%, 80%, 85%, 90%, 95%, 100%, 110%, 150%, 200%, 250%, 300%, 400% or 500%, as compared to the β-catenin signaling induced by a neutral substance or negative control as measured in an assay described above, for example as measured in the TOPFIash assay (see, e.g., Molinaar (1996) Cell 86:391-399). A negative control may be included in these assays. By way of example, WNT surrogate molecules may enhance β-catenin signaling by a factor of 2×, 5×, 10×, 100×, 1000×, 10000× or more as compared to the activity in the absence of the WNT surrogate molecule when measured, for example when measured in the TOPFIash assay.

[0105] In certain embodiments, functional properties of the surrogate molecules (and WNT super agonists and WNT enhancers or RSPO mimetics) may be assessed using a variety of methods known to the skilled person, including e.g., affinity/binding assays (for example, surface plasmon resonance, competitive inhibition assays), cytotoxicity assays, cell viability assays, cell proliferation or differentiation assays in response to the native molecule/ligand, cancer cell and/or tumor growth inhibition using in vitro or in vivo models, including but not limited to any described herein. The surrogate molecules may also be tested for effects on one or both co-receptor internalization, in vitro and in vivo efficacy, etc. Such assays may be performed using well-established protocols known to the skilled person (see e.g., Current Protocols in Molecular Biology (Greene Publ. Assoc. Inc. & John Wiley & Sons, Inc., NY, NY); Current Protocols in Immunology (Edited by: John E. Coligan, Ada M. Kruisbeek, David H. Margulies, Ethan M. Shevach, Warren Strober 2001 John Wiley & Sons, NY, NY); or commercially available kits.

[0106] In certain embodiments, a binding region of a surrogate molecule (e.g., an antigen-binding fragment of an anti-FZD antibody) comprises one or more of the CDRs of the anti-co-receptor antibodies. In this regard, it has been shown in some cases that the transfer of only the VHCDR3 of an antibody can be performed while still retaining desired specific binding (Barbas et al., PNAS (1995) 92: 2529-2533). See also, McLane et al., PNAS (1995) 92:5214-5218, Barbas et al., J. Am. Chem. Soc. (1994) 116:2161-2162).

[0107] Also disclosed herein is a method for obtaining an antibody or antigen binding domain specific for a co-receptor, the method comprising providing by way of addition, deletion, substitution or insertion of one or more amino acids in the amino acid sequence of a VH domain set out herein or a VH domain which is an amino acid sequence variant of the VH domain, optionally combining the VH domain thus provided with one or more VL domains, and testing the VH domain or VH/VL combination or combinations to identify a specific binding member or an antibody antigen binding domain specific for one or more co-receptors and optionally with one or more desired properties. The VL domains may have an amino acid sequence which is substantially as set out herein. An analogous method may be employed in which one or more sequence variants of a VL domain disclosed herein are combined with one or more VH domains.

[0108] Immunological binding generally refers to the non-covalent interactions of the type which occur between an immunoglobulin molecule and an antigen for which the immunoglobulin is specific, for example by way of illustration and not limitation, as a result of electrostatic, ionic, hydrophilic and/or hydrophobic attractions or repulsion, steric forces, hydrogen bonding, van der Waals forces, and other interactions. The strength, or affinity of immunological binding interactions can be expressed in terms of the dissociation constant (Kd) of the interaction, wherein a smaller Kd represents a greater affinity. Immunological binding properties of selected polypeptides can be quantified using methods well known in the art. One such method entails measuring the rates of antigen-binding site/antigen complex formation and dissociation, wherein those rates depend on the concentrations of the complex partners, the affinity of the interaction, and on geometric parameters that equally influence the rate in both directions. Thus, both the “on rate constant” (Kon) and the “off rate constant” (Koff) can be determined by calculation of the concentrations and the actual rates of association and dissociation. The ratio of Koff/Kon enables cancellation of all parameters not related to affinity, and is thus equal to the dissociation constant Kd. See, generally, Davies et al. (1990) Annual Rev. Biochem. 59:439-473.

[0109] In certain embodiments, the surrogate molecules or binding regions thereof described herein have an affinity of less than about 10,000 nM, less than about 1000 nM, less than about 100 nM, less than about 10 nM, less than about 1 nM, or less than about 0.1 nM, and in some embodiments, the antibodies may have even higher affinity for one or more co-receptors.

[0110] The constant regions of immunoglobulins show less sequence diversity than the variable regions, and are responsible for binding a number of natural proteins to elicit important biochemical events. In humans, there are five different classes of antibodies including IgA (which includes subclasses IgA1 and IgA2), IgD, IgE, IgG (which includes subclasses IgG1, IgG2, IgG3, and IgG4), and IgM. The distinguishing features between these antibody classes are their constant regions, although subtler differences may exist in the V region. Molecules disclosed herein may comprise an antibody constant region of any class, subclass, or isotype.

[0111] The Fc region of an antibody interacts with a number of Fc receptors and ligands, imparting an array of important functional capabilities referred to as effector functions. For IgG, the Fc region comprises Ig domains CH2 and CH3 and the N-terminal hinge leading into CH2. An important family of Fc receptors for the IgG class are the Fc gamma receptors (FcγRs). These receptors mediate communication between antibodies and the cellular arm of the immune system (Raghavan et al., 1996, Annu Rev Cell Dev Biol 12:181-220; Ravetch et al., 2001, Annu Rev Immunol 19:275-290). In humans this protein family includes FcγRI (CD64), including isoforms FcγRIa, FcγRIb, and FcγRIc; FcγRII (CD32), including isoforms FcγRIIa (including allotypes H131 and R131), FcγRIIb (including FcγRIIb-1 and FcγRIIb-2), and FcγRIIc; and FcγRIII (CD16), including isoforms FcγRIIIa (including allotypes V158 and F158) and FcγRIIIb (including allotypes FcγRIIIb-NA1 and FcγRIIIb-NA2) (Jefferis et al., 2002, Immunol Lett 82:57-65). These receptors typically have an extracellular domain that mediates binding to Fc, a membrane spanning region, and an intracellular domain that may mediate some signaling event within the cell. These receptors are expressed in a variety of immune cells including monocytes, macrophages, neutrophils, dendritic cells, eosinophils, mast cells, platelets, B cells, large granular lymphocytes, Langerhans' cells, natural killer (NK) cells, and T cells. Formation of the Fc/FcγR complex recruits these effector cells to sites of bound antigen, typically resulting in signaling events within the cells and important subsequent immune responses such as release of inflammation mediators, B cell activation, endocytosis, phagocytosis, and cytotoxic attack.

[0112] The ability to mediate cytotoxic and phagocytic effector functions is a potential mechanism by which antibodies destroy targeted cells. The cell-mediated reaction wherein nonspecific cytotoxic cells that express FcγRs recognize bound antibody on a target cell and subsequently cause lysis of the target cell is referred to as antibody dependent cell-mediated cytotoxicity (ADCC) (Raghavan et al., 1996, Annu Rev Cell Dev Biol 12:181-220; Ghetie et al., 2000, Annu Rev Immunol 18:739-766; Ravetch et al., 2001, Annu Rev Immunol 19:275-290). The cell-mediated reaction wherein nonspecific cytotoxic cells that express FcγRs recognize bound antibody on a target cell and subsequently cause phagocytosis of the target cell is referred to as antibody dependent cell-mediated phagocytosis (ADCP). All FcγRs bind the same region on Fc, at the N-terminal end of the Cg2 (CH2) domain and the preceding hinge. This interaction is well characterized structurally (Sondermann et al., 2001, J Mol Biol 309:737-749), and several structures of the human Fc bound to the extracellular domain of human FcγRIIIb have been solved (pdb accession code 1E4K) (Sondermann et al., 2000, Nature 406:267-273) (pdb accession codes 1IIS and IIIX) (Radaev et al., 2001, J Biol Chem 276:16469-16477.)

[0113] The different IgG subclasses have different affinities for the FcγRs, with IgG1 and IgG3 typically binding substantially better to the receptors than IgG2 and IgG4 (Jefferis et al., 2002, Immunol Lett 82:57-65). All FcγRs bind the same region on IgG Fc, yet with different affinities: the high affinity binder FcγRI has a Kd for IgG1 of 10⁻⁸ M⁻¹, whereas the low affinity receptors FcγRII and FcγRIII generally bind at 10⁻⁶ and 10⁻⁵ respectively. The extracellular domains of FcγRIIIa and FcγRIIIb are 96% identical; however, FcγRIIIb does not have an intracellular signaling domain. Furthermore, whereas FcγRI, FcγRIIa/c, and FcγRIIIa are positive regulators of immune complex-triggered activation, characterized by having an intracellular domain that has an immunoreceptor tyrosine-based activation motif (ITAM), FcγRIIb has an immunoreceptor tyrosine-based inhibition motif (ITIM) and is therefore inhibitory. Thus the former are referred to as activation receptors, and FcγRIIb is referred to as an inhibitory receptor. The receptors also differ in expression pattern and levels on different immune cells. Yet another level of complexity is the existence of a number of FcγR polymorphisms in the human proteome. A particularly relevant polymorphism with clinical significance is V158/F158 FcγRIIIa. Human IgG1 binds with greater affinity to the V158 allotype than to the F158 allotype. This difference in affinity, and presumably its effect on ADCC and/or ADCP, has been shown to be a significant determinant of the efficacy of the anti-CD20 antibody rituximab (Rituxan®, a registered trademark of IDEC Pharmaceuticals Corporation). Subjects with the V158 allotype respond favorably to rituximab treatment; however, subjects with the lower affinity F158 allotype respond poorly (Cartron et al., 2002, Blood 99:754-758). Approximately 10⁻²⁰% of humans are V158/V158 homozygous, 45% are V158/F158 heterozygous, and 35-45% of humans are F158/F158 homozygous (Lehrnbecher et al., 1999, Blood 94:4220-4232; Cartron et al., 2002, Blood 99:754-758). Thus 80-90% of humans are poor responders, that is, they have at least one allele of the F158 FcγRIIIa.

[0114] The Fc region is also involved in activation of the complement cascade. In the classical complement pathway, C1 binds with its C1q subunits to Fc fragments of IgG or IgM, which has formed a complex with antigen(s). In certain embodiments of the invention, modifications to the Fc region comprise modifications that alter (either enhance or decrease) the ability of a FZD-specific antibody as described herein to activate the complement system (see e.g., U.S. Pat. No. 7,740,847). To assess complement activation, a complement-dependent cytotoxicity (CDC) assay may be performed (See, e.g., Gazzano-Santoro et al., J. Immunol. Methods, 202:163 (1996)).

[0115] Thus in certain embodiments, the present invention provides the surrogate molecules having a modified Fc region with altered functional properties, such as reduced or enhanced CDC, ADCC, or ADCP activity, or enhanced binding affinity for a specific FcγR or increased serum half-life. Other modified Fc regions contemplated herein are described, for example, in issued U.S. Pat. Nos. 7,317,091; 7,657,380; 7,662,925; 6,538,124; 6,528,624; 7,297,775; 7,364,731; Published U.S. Applications US2009092599; US20080131435; US20080138344; and published International Applications WO2006/105338; WO2004/063351; WO2006/088494; WO2007/024249.

[0116] Structurally, the Fc region can be important for proper assembly of the msAb. In particular, modifications to the CH3 domain such as knobs-in-hole (see, e.g., WO1996/027011; and WO1998/050431) or Azymetric mutations (see, e.g., WO2012/58768) can prevent heavy chain mispairing. The present invention utilizes these mutations in certain Fc embodiments.

[0117] The surrogate molecules disclosed herein may also be modified to include an epitope tag or label, e.g., for use in purification or diagnostic applications. There are many linking groups known in the art for making antibody conjugates, including, for example, those disclosed in U.S. Pat. No. 5,208,020 or EP Patent 0 425 235 B1, and Chari et al., Cancer Research 52:127-131 (1992). The linking groups include disulfide groups, thioether groups, acid labile groups, photolabile groups, peptidase labile groups, or esterase labile groups, as disclosed in the above-identified patents, disulfide and thioether groups being preferred.

[0118] In certain embodiments, and antigen-binding fragments thereof against one co-receptor and/or antibodies and antigen-binding fragments thereof against the other co-receptor present within a surrogate molecule are monoclonal. In certain embodiments, they are humanized.

### IV. WNT Signal Enhancing Molecules (WNT Enhancers)

[0119] RSPOs are capable of amplifying WNT signals. The minimal functional unit of RSPO is composed of two Furin domains, Furin domain 1 that binds to ZNRF3/RNF43 E3 ligases, and Furin domain 2 that binds to LGR4-6, bringing together a ternary complex of RSPO, LGR, and the E3 ligases. This results in internalization of the whole complex and removal of ZNRF3/RNF43 away from their targets of destruction. Furin domain 1 alone is not functional, but it is capable of binding to both ZNRF3 and RNF43. In particular embodiments, when used in combination with a WNT or WNT surrogate molecule (e.g., to contact a cell), a WNT signal enhancing molecule increases signaling as compared to if only the WNT or WNT surrogate was used, e.g., by at least 10%, at least 20%, at least 30%, at least 50%, or at least two-fold, at least 3-fold, at least five-fold, or at least 10-fold.

[0120] The action module or E3 ligase binding domain responsible for enhancing WNT signaling described herein can be, but is not limited to, any functional moiety that can bind to the ZNRF3/RNF43 ligases, e.g., polypeptides, antibodies or fragments thereof, or organic chemicals. In particular embodiments, the action module, for example a polypeptide comprising the Furin domain 1 of an RSPO, either alone or together with a tissue specific targeting module (which may be substantially inactive in non-target tissues, so as to minimize potential off-target effects). The action module is fused to or bound to at least one WNT receptor or receptor binding domain, and when the E3 ligases ZNRF3/RNF43 are recruited to a ternary leading them to be relocated on the cell surface, sequestered, and/or cleared from the cell surface.

[0121] In certain embodiments, the action module or E3 ligase binding domain comprises a fragment or variant of an RSPO polypeptide (e.g., any of RSPOs 1-4), or a functional fragment or variant thereof. In particular embodiments, the action module comprises a fragment of a wild-type RSPO, and in other embodiments, the action module comprises a fragment of an RSPO comprising one or more amino acid modifications. The RSPO may be any RSPO known in the art or a homolog thereof, including RSPOs from any animal species, including but not limited to mammalian species, such as human RSPOs. RSPOs have been identified and described, and their polypeptide and encoding polynucleotide sequences are known and available in the art. In particular embodiments, the RSPO polypeptide is a human RSPO or a homolog found in other vertebrates or non-vertebrates, e.g., a mouse RSPO. Their homologues and variants are available from general database search, such as https://www.dot.ncbi.dot.nlm.dot.nih.dot.gov/protein/. The present invention includes (but is not limited to) action modules comprising or consisting of fragments and variants of any of these or other RSPOs, in particular, RSPO 2. In various embodiments, variants of any of the RSPO polypeptides and fragments thereof comprise one or more amino acid modifications, e.g., deletions, additions, or substitutions as compared to the wild-type RSPO polypeptide. The modification(s) may be present in any region of the variant of RSPO or a fragment thereof, including but not limited to a Furin domain 1 and/or a Furin domain 2. In particular embodiments, the RSPO is RSPO 2 containing mutations in the Furin domain 2, e.g., F105R and F109A, resulting in abrogated LGR4-6 binding. This mutant RSPO is known as “RSPO2RA”. It is understood that amino acid modifications outside of the Furin domain 1 or Furin domain 2 may alter the resulting variant such that the resulting variant has reduced LGR4-6 binding activity as compared to the wild-type RSPO or fragment thereof.

[0122] In certain embodiments, the action module comprises or consists of an RSPO sequence, e.g., a full length or wild-type RSPO-1, -2, -3 or -4, optionally a human RSPO-1, -2, -3, or -4, or a variant or fragment thereof. In particular embodiments, it is a variant of any of RSPOs-1-4 having at least 80%, at least 85%, at least 90%, at least 95%, at least 98%, or at least 99% sequence identity to the corresponding wild-type RSPO-1-4 sequence. In certain embodiments, the action module comprises or consists of a full length RSPO (e.g., any of RSPOs-1-4) comprising one or more amino acid modifications, including but not limited to any of those disclosed herein. In certain embodiments, the action module comprises or consists of a fragment of a wild-type or modified RSPO (e.g., any of RSPOs-1-4). In particular embodiments, the fragment is able to bind to ZNRF3 and/or RNF43. In certain embodiments, the action module comprises the Furin domain 1 of an RSPO protein, or fragments or variants of RSPO proteins. In certain embodiments, the action module comprises or consists of one or more (e.g., one, two or three or more Furin domain 1 of an RSPO protein (e.g., RSPO-1-4), or a variant thereof having at least 85%, at least 90%, at least 95%, at least 98% or at least 99% sequence identify to an RSPO Furin domain 1. In certain embodiments, the action module comprises an RSPO Furin 1 domain or variant or fragment thereof and an RSPO Furin 2 domain or variant or fragment thereof. In certain embodiments, the action module comprises an antibody, or antigen binding fragment thereof, that bind ZNRF3/RNF43. In particular embodiments, the action module specifically binds to either ZNRF3 or RNF43. Examples of ZNRF3/RNF43 binding molecules are described in WO2020014271.

[0123] In certain embodiments, the action module or E3 ligase binding domain comprises one or more Furin domain 1 of an RSPO, e.g., human RSPO 1 or human RSPO 2, or a variant thereof. In certain embodiments, the action module comprises one or more Furin domain 1 of an RSPO, but it does not comprise a Furin domain 2 of an RSPO. In certain embodiments, the action module comprises one or more Furin domain 1 of an RSPO, and it comprises a modified or variant Furin domain 2 of an RSPO, e.g., a Furin domain 2 with reduced activity as compared to the wild-type Furin domain 2. In certain embodiments, the action module comprises an RSPO protein having a modified or variant Furin domain 2 of an RSPO, e.g., a Furin domain 2 with reduced activity as compared to the wild-type Furin domain 2. In certain embodiments, an action module comprises two or more Furin domains 1, or variants thereof, or multimers of a Furin domain 1 or variant thereof. In certain embodiments, the action module comprises a variant RSPO Furin 1 domain comprising one or more point mutations, e.g., at amino acid residues corresponding to K58, H76, S77, R86, and/or N91 of human RSPO 2. In certain embodiments, the action module comprises a variant RSPO Furin 2 domain comprising one or more point mutations, e.g., at amino acid residues corresponding to F105, F109 (e.g., “RSPO2RA”), and/or K121 of human RSPO 2. In particular embodiments, the action module comprises a modified or variant Furin domain 1 of an RSPO that has increased activity, e.g., binding to ZNRF3/RNF43, as compared to the wild-type Furin domain 1. Action modules or E3 ligase binding domain may further comprise additional moieties or polypeptide sequences, e.g., additional amino acid residues to stabilize the structure of the WNT signal enhancing molecule in which it is present. In certain embodiments, an action module comprises a peptide or polypeptide without obvious/strong sequence homology to RSPOs but has binding affinity to ZNRF3/RNF43 comparable to or higher than the binding affinity of RSPOs to ZNRF3/RNF43.

[0124] In certain embodiments, the action module or E3 ligase binding domain comprises a Furin domain 1 of an RSPO polypeptide (e.g., a human RSPO), or a functional fragment or variant thereof, and a modified or variant Furin domain 2 of an RSPO polypeptide (e.g., a human RSPO), wherein the modified Furin domain 2 has reduced binding affinity to LGR4-6 as compared to the corresponding wild-type Furin domain 2. In certain embodiments, the Furin domain 2 comprises one or more point mutations, e.g., at amino acid residues corresponding to F105 and/or F109 of human RSPO 2. The skilled artisan can readily determine the corresponding amino acid residues in other RSPO polypeptides by comparing their amino acid sequences to human RSPO 2. In certain embodiments, the action module or E3 ligase binding domain comprises a Furin domain 1 or variant thereof and a Furin domain 2 or variant thereof, wherein the Furin domain 1 and/or Furin domain 2 comprises one or more point mutations. The one or more point mutations within the action module or E3 ligase binding domain (as compared to the corresponding wild-type RSPO sequence) may occur at any amino acid residues within the Furin domain 1 and/or Furin domain 2, including but not limited to, e.g., at amino acid residues K58, H76, S77, R86, N91, F105, F109, or K121 and other residues that can be modified to reduce the binding affinity to LGR4-6. Regions of the Furin domain 1 and Furin domain 2 of human RSPO 1 that are important for its functional activity have been identified, including conserved hydrophilic residues S48, N51, R66, R70 and Q71, and less conserved, hydrophobic residues, L46, L54, 162 and L64, which are important for binding to the E3 ligases. In addition, in the human RSPO 1 Furin domain 1, amino acid residues K59, S78, D85, R87, N88 and N92 form a hydrophilic interaction surface with LGR5, and the FSHNF amino acid sequence has been identified as a loop important for the hydrophobic surface.

[0125] In particular embodiments, action modules or E3 ligase binding domains comprising RSPO Furin domain 1 and/or Furin domain 2 may comprise one or more mutations within any of these regions, surfaces or amino acid residues. In particular embodiments, action modules comprising RSPO Furin domain 1 and/or Furin domain 2 may comprise one or more mutations or other alternations beyond these regions, surfaces or amino acid residues, which indirectly compromise LGR4-6 binding by affecting the structure and/or stability of the binding surface. In certain embodiments, action modules comprising RSPO Furin domain 1 and/or Furin domain 2 may comprise one or more mutations at any amino acid residues, including but not limited to any of those depicted in the accompanying Examples. In particular embodiments, the action module comprises a Furin 1 domain and a modified Furin domain 2 comprising amino acid substitutions at amino acid residues F105 and/or F109 (e.g., RSPO2RA). In particular embodiments, the action module comprises a modified Furin 1 domain and a modified Furin 2 domain, where in certain embodiments, the modified Furin 1 domain comprises one or more amino acid modifications at amino acids R65, R69 and/or Q70, and the modified Furin domain comprises one or more amino acid modification at amino acids F105 and/or F109. In particular embodiments, the modified Furin domain 2 has binding affinity to LGR4-6 less than 80%, less than 50%, less than 20%, or less than 10% the binding of the corresponding wild-type Furin domain 2, e.g., in the context of the full length RSPO protein.

[0126] In certain embodiments, the action module or E3 ligase binding domain comprises a Furin domain 1 of an RSPO polypeptide (e.g., a human RSPO), or a functional fragment or variant thereof, and an unmodified Furin domain 2 of an RSPO polypeptide (e.g., a human RSPO). While in certain embodiments, a modified Furin domain 2 having reduced binding affinity to LGR4-6 as compared to the corresponding wild-type Furin domain 2 is more desirable to increase the specificity of tissue targeting, in particular embodiments, the unmodified Furin domain 2 combined with the targeting module has improved tissue targeting over wild-type RSPO without targeting module, and has utility in certain contexts.

[0127] In certain embodiments, the action module or E3 ligase binding domain comprises a wild-type or modified RSPO Furin domain 1, e.g., from any of RSPO-1, -2, -3, -4, optionally human RSPOs-1, -2, -3 or -4. In particular embodiments, the action module comprises the RSPO Furin 1 domain and a wild-type or modified RSPO Furin 2 domain, e.g., from any of RSPO-1, -2, -3, -4, optionally human RSPOs-1, -2, -3 or -4. In particular embodiments, the action module comprises the first RSPO Furin 1 domain and a second wild-type or modified RSPO Furin 1 domain, e.g., from any of RSPO-1, -2, -3, -4, optionally human RSPOs-1, -2, -3 or -4. In particular embodiments, the modified Furin domain 2 has comparable binding affinity to LGR4-6 or a binding affinity to LGR4-6 of less than 80%, less than 50%, less than 20%, or less than 10% the binding of the corresponding wild-type Furin domain 2, e.g., in the context of the full length RSPO protein. In certain embodiments, the action module comprises an antibody or antigen-binding fragment thereof that specifically binds ZNRF3 and/or RNF43. In particular embodiments, the action module comprises an antibody or antigen-binding fragment thereof that binds to human RNF43 (hRNF43, NCBI reference sequence XP_011523257.1), or human ZNRF3 (hZNRF3; NCBI reference sequence NP_001193927.1). In particular embodiments, the action module is an antibody or an antigen-binding fragment thereof, comprising: a) CDRH1, CDRH2 and CDRH3 sequences set forth for any of the antibodies of WO2020014271 (e.g., see Table 2A); and/or b) CDRL1, CDRL2 and CDRL3 sequences set forth for any of the antibodies of WO2020014271 (e.g., see Table 2A), or a variant of said antibody, or antigen-binding fragment thereof, comprising one or more amino acid modifications, wherein said variant comprises less than 8 amino acid substitutions in said CDR sequences.

### V. WNT Super Agonist Structures

[0128] The present invention encompasses WNT super agonist molecules, in particular, molecules containing a WNT surrogate (e.g., a FZD binder and an LRP binder) in combination with a WNT enhancer (e.g., an RSPO protein or E3 ligase binder). It was surprisingly found that molecules comprising both a WNT surrogate and a WNT enhancer acted as WNT super agonists, and induced a greater level of WNT signaling pathway activity than a WNT surrogate. In particular, it was expected that fusing an E3 ligase binding domain to a WNT surrogate would enhance ubiquitination of the target receptors of the WNT surrogate, and result in antagonism, based on previous studies of PROTAC, i.e., Deshaies, R. J., Nature, Vol 580, 16 Apr. 2020, p. 329). Similarly, it was previously shown that Disheveled binds to WNT receptors and serves as an adaptor to target the ZNRF3 and RNF43 E3 ubiquitin ligases to WNT receptors, leading to their degradation (Jiang, X. et al., 2015, Molecular Cell 58, 522-533). Thus, it was surprising and unexpected to find that the WNT enhancer (or RSPO mimetic, where the E3 ligase binding domain is fused to a FZD or LRP binding domain) and WNT super agonists disclosed herein resulted in increased levels of FZD protein on the cell surface and actually stimulated the WNT signaling pathway.

[0129] In certain embodiments, a WNT super agonist molecule enhances or increases the co-receptors pathway signaling, e.g., in the case of WNT—β-catenin signaling, by at least 30%, 35%, 40%, 45%, 50%, 60%, 70%, 75%, 80%, 85%, 90%, 95%, 100%, 110%, 150%, 200%, 250%, 300%, 400% or 500%, as compared to the β-catenin signaling induced by a neutral substance or negative control as measured in an assay described above, for example as measured in the TOPFlash assay (see, e.g., Molinaar (1996) Cell 86:391-399).

[0130] In certain embodiments, a WNT super agonist molecule comprises a first binding domain that binds one or more FZD; a second binding domain that binds LRP5/6; and a third domain comprising a WNT enhancer, e.g., wherein the WNT enhancer comprises an E3 ligase binding domain. These domains may be present on one, two, three, or four polypeptides. When present on more than one polypeptide, the two or more polypeptides may be bound to each other to form the WNT super agonist. Non-limiting examples of various WNT super agonist structures contemplated by the disclosure are provided in Table 4 and FIGS. 8A-8B.

[0131] In certain embodiments, a WNT super agonist molecule comprises any of the structures disclosed herein for a WNT surrogate molecule, while further comprising a WNT enhancer domain and, optionally, a targeting module. In some embodiments, the WNT enhancer domain comprises an RSPO protein or functional variant or fragment thereof. In some embodiments, the WNT enhancer domain binds one or more E3 ligase. In particular embodiments, the WNT enhancer domain does not substantially bind to LGR. In particular embodiments, the WNT enhancer domain is a mutant RSPO that lacks an LGR binding region.

[0132] In some embodiments, the WNT super agonist molecule further comprises a targeting module, e.g., a targeting module that binds specific cell types or tissue types. In certain embodiments of WNT super agonists, one or more WNT enhancer domain is fused to either end of any polypeptide present within a WNT surrogate molecule. In particular embodiments, one, two, three, or four WNT enhancer domains are present within a WNT super agonist.

[0133] In certain embodiments, the WNT surrogates, WNT enhancers, or WNT super agonists comprise or have a structure including, but not limited to, a tandem scFv, scFv-IgG, Fv-IgG, Fab-IgG, VHH-IgG, or Fv-Fab (see, e.g., the general structures of FIG. 1A and the specific structures of FIGS. 2A, 2D, 2E, 3A, 3J, 3L, 3M, 4, 7, 8A, 8B, and Tables 3 and 4).

[0134] Tandem scFv super agonists are generated and assembled by linking or directly fusing a first scFv to either the C- or N-terminus of a second scFv molecule. In one format, the first scFv can bind to one or more FZD receptors and the second scFv can bind to one or more LRP receptors. In an alternative format, the first scFv can bind to one or more LRP receptors, and the second scFv can bind to one or more FZD receptors. One of the scFv molecules can also be linked or directly fused at its C-terminus to the N-terminus of an Fc molecule. In certain embodiments of WNT super agonists, the WNT enhancer is linked or fused to the N-terminus of a first scFv, which in turn is linked or fused to the N-terminus of the second scFv, which is linked or fused to the N-terminus of the Fc molecule. In alternative embodiments, the WNT enhancer is linked or fused to the C-terminus of the Fc molecule, which in turn is linked or fused to the C-terminus of one scFv molecule, which is linked or fused at its N-terminus to the C-terminus of a second scFv molecule.

[0135] Fab-IgG molecules, where the FZD and LRP binders are both Fabs can be assembled in various approaches, such as charge pairing, knobs-in-holes, crossover of heavy and light chains of the Fabs, etc. In charge pairing the heavy chain (VH-CH1) domain of an anti-LRP6 Fab or an anti-FZD Fab (through direct fusion or a linker, e.g., a linker of 1-30 or 5-15 amino acid, e.g., 5, 10, or 15-mer amino acids) are fused in tandem with the N-terminus of the heavy chain (VH-CH1-CH2-CH3) of an anti-FZD or anti-LRP binder. In certain embodiments, also known as Fabs-in tandem (FiT), both VH-CH1 domains of anti-LRP6 and anti-FZD contain three amino acid mutations (Q39D, Q105D, S183K in the anti-LRP6 Fab; Q39K, Q105K, S183E in anti-FZD Fab) each for proper paring with their own partner light chains, which also contain three complementary amino acid mutations (Q38K, A/S43K, S176E in anti-LRP6 light chain; Q38D, A/S43D, S176K in the anti-FZD light chain). The order of the anti-LRP6 and anti-FZD Fabs could be reversed, where the anti-FZD binder is a Fab and is fused to anti-LRP binder which is in IgG format. In certain embodiments, the WNT enhancer can be attached to the Fab to the N-terminus of either the Vh or Vl the Fab furthest from the IgG domain. In other embodiments, the WNT enhancer is attached to C-terminus of the IgG domain.

[0136] HC-LC cross over approach for Fab-on-IgG format: The light chain (VL-CL) domains of anti-LRP6 binder is (through direct fusion or a linker, e.g., a linker of 1-30 or 5-15 amino acid, e.g., 5, 10, or 15-mer amino acids) fused in tandem with the N-terminus of the heavy chain (VH-CH1-CH2-CH3) of an anti-FZD binder. The second construct was VH-CH1 of the anti-LRP6 binder and the third construct was VL-CL of the anti-FZD binder. Similar to the example above, the order of the anti-LRP6 and the anti-FZD binders could be reversed, where anti-FZD binder Fab is fused to the N-terminus of the anti-LRP binder which is in IgG format. Also as above the WNT enhancer can be attached to N-terminus of the VH or VL of the crossover Fab furthest from the IgG domain, or attached to the C-terminus of the IgG domain.

[0137] In certain embodiments, the WNT surrogate region of the WNT super agonist is an Fv-IgG. Illustrative examples of various structural formats that may be used are provided in FIG. 1A, and FIGS. 8A and 8B, as well as Table 4. In particular embodiments, the WNT super agonist is an Fv-IgG with the components including at least one binding domain that binds to at least one FZD receptor, at least one binding domain that binds to an LRP receptor, and either at least one RSPO protein (mutant or wild-type) or at least one binding domain that binds to an E3 ubiquitin ligase. In some embodiments, the LRP binding domain is a VHH or Fab fragment linked to the N-terminus of a Fab that binds to a FZD receptor, which is fused to an Fc domain at the C terminus of the FZD Fab (see, e.g., FIGS. 2A, 2D, 2E, 3A, 3J, 3L, 3M, 4A, 8A, 8B, and Table 4). In some embodiments, the FZD binding domain is a VHH or Fab fragment linked to the N-terminus of a Fab that binds to LRP5/6, which is fused to an Fc domain at the C terminus of the LRP5/6 Fab. In further embodiments, the Fv-IgG contains the LRP5/6 VHH and FZD Fab, with an RSPO protein or E3 ligase binder attached to the C-terminus of the Fc domain. Alternatively, the RSPO or E3 ligase binder can be attached to the C-terminus of the heavy or light chain of the Fab (see, e.g., FIG. 3J, FIGS. 8A and 8B, and Table 4).

[0138] In certain embodiments, the WNT surrogate region of the WNT super agonist is an Fv-IgG comprising four linked polypeptides, e.g., as depicted in FIG. 8A or FIG. 8B. In certain embodiments, the Fv-IgG comprises two heavy chain polypeptides and two light chain polypeptides. In certain embodiments, each heavy chain polypeptide comprises an Fc region, a variable region of an anti-FZD antibody, and a variable region of an anti-LRP5/6 antibody, wherein the two variable regions are present N-terminal to the Fc region, and wherein the two variable regions may be in either order. In one embodiment, the heavy chain comprises from N-terminus to C-terminus: an anti-LRP5/6 antibody variable region, an anti-FZD variable region, and an Fc region. In particular embodiments, one or both variable region is present within a Fab. The heavy chain may further comprise additional sequences, such as, e.g., a hinge region between the Fc region and the variable regions (or Fab). In particular embodiments, the two light chain polypeptides each comprise a variable region of an anti-FZD antibody, and a variable region of an anti-LRP5/6 antibody, wherein the two variable regions may be in either order, and wherein either or both variable region is present within a Fab. In particular embodiments, an E3 ligase binding domain is fused to the C-terminus or N-terminus of one or both heavy chains. In particular embodiments, an E3 ligase binding domain is fused to the C-terminus or N-terminus of one or both light chains (see, e.g., FIG. 8B). In particular embodiments, the two heavy chain polypeptides of the WNT super agonist molecule are the same, and bind to each other. In certain embodiments, the two heavy chain polypeptides of the WNT super agonist molecule are different, for example, when the WNT super agonist molecule includes only one E3 ligase binding domain. In order to properly combine a heavy chain without an E3 ligase domain with a heavy chain having an E3 ligase domain, the two different heavy chains may be engineered to selectively bind to each other to produce heterodimers, e.g., by introducing Knob-into-holes amino acid modifications into the two different polypeptides to facilitate their binding.

[0139] Additionally, the Fv-IgG or other format structure, can include a tissue or cell targeting domain, which can be attached at similar sites as the RSPO or E3 ligase binder or can be an full length antibody that binds a tissue/cell specific target with the WNT receptor binding domains and RSPO/E3 ligase binding domains attached at various sites as described above.

[0140] In particular embodiments, any of the domains present in the WNT super agonist are directly joined, or may be separated via a linker, e.g., a polypeptide linker, or a non-peptidic linker, etc. The length of the linker, and therefore the spacing between the binding domains can be used to modulate the signal strength, and can be selected depending on the desired use of the WNT super agonist molecule. The enforced distance between any of the various linked binding domains can vary, but in certain embodiments may be less than about 100 angstroms, less than about 90 angstroms, less than about 80 angstroms, less than about 70 angstroms, less than about 60 angstroms, or less than about 50 angstroms. In some embodiments, the linker is a rigid linker, in other embodiments the linker is a flexible linker. In certain embodiments where the linker is a peptide linker, it may be from about 1-30 amino acids in length, about 5-15 amino acids in length, or about 1, 2, 3, 4, 5, 6, 7, 8, 9, 10, 11, 12, 13, 14, 15, 16, 17, 18, 19, 20 21, 22, 23, 24, 25, 26, 27, 28, 29, 30 or more amino acids in length, and is of sufficient length and amino acid composition to enforce the distance between binding domains. In some embodiments, the linker comprises or consists of one or more glycine and/or serine residues.

[0141] In particular embodiments, the WNT super agonist comprises any of the ratios of FZD binding domains and LRP5/6 binding domains disclosed herein for WNT surrogate molecules. In particular embodiments, the WNT super agonist comprises any of the ratios of FZD binding domains and LRP5/6 binding domains disclosed herein for WNT surrogate molecules, and further comprises one or two E3 ligase binding domains.

[0142] In certain embodiments, the WNT super agonist molecules or one or more binding regions thereof described herein have an affinity of less than about 10,000 nM, less than about 1000 nM, less than about 100 nM, less than about 10 nM, less than about 1 nM, or less than about 0.1 nM, and in some embodiments, the antibodies may have even higher affinity for one or more co-receptors.

[0143] In particular embodiments, a WNT super agonist comprises one or more polypeptide sequence disclosed herein, e.g., in the Examples, or a functional variant or fragment thereof.

### VI. Targeting Molecules

[0144] Any of the molecules disclosed herein, e.g., WNT super agonists, WNT surrogates, and WNT enhancers (RSPO mimetics) may further comprise a cell- or tissue-specific binding domain.

[0145] Specific cell types and cells within specific tissue may comprise one or more cell- or tissue-specific surface molecule, such as a cell surface receptor. As used herein, the molecule is said to be cell- or tissue-specific if a greater amount of the molecule is present on the specific cell or tissue type as compared to one or more other cell or tissue types, or any other cell or tissue type. In certain embodiments, the greater amount is at least two-fold, at least five-fold, at least 10-fold, at least 20-fold, at least 50-fold, or at least 100-fold as compared to the amount in the one or more other cell or tissue types, or any other cell or tissue type. In particular embodiments, the cell-specific surface molecule has increased or enhanced expression on a target organ, tissue or cell type, e.g., an organ, tissue or cell type in which it is desirous to enhance WNT signaling, e.g., to treat or prevent a disease or disorder, e.g., as compared to one or more other non-targeted organs, tissues or cell types. In certain embodiments, the cell-specific surface molecule is preferentially expressed on the surface of the target organ, tissue or cell type as compared to one or more other organ, tissue or cell types, respectively. For example, in particular embodiments, a cell surface receptor is considered to be a tissue-specific or cell-specific cell surface molecule if it is expressed at levels at least two-fold, at least five-fold, at least 10-fold, at least 20-fold, at least 30-fold, at least 40-fold, at least 50-fold, at least 100-fold, at least 500-fold, or at least 1000-fold higher in the target organ, tissue or cell than it is expressed in one or more, five or more, all other organs, tissues or cells, or an average of all other organs, tissue or cells, respectively. In certain embodiments, the tissue-specific or cell-specific cell surface molecule is a cell surface receptor, e.g., a polypeptide receptor comprising a region located within the cell surface membrane and an extracellular region to which the targeting module can bind. In various embodiments, the methods described herein may be practiced by specifically targeting cell surface molecules that are only expressed on the target tissue or a subset of tissues including the target tissue, or by specifically targeting cell surface molecules that have higher levels of expression on the target tissue as compared to all, most, or a substantial number of other tissues, e.g., higher expression on the target tissue than on at least two, at least five, at least ten, or at least twenty other tissues.

[0146] The targeted tissue may be bound by a targeting module, e.g., a binding domain that specifically binds to the tissue specific receptor. The targeted tissue may be any tissue, e.g., any mammalian tissue or cell type. In certain embodiments, the targeted tissue may be present in any organ. In certain embodiments, the target tissue is bone tissue, liver tissue, skin tissue, stomach tissue, intestine tissue, oral mucosa tissue, kidney tissue, central nervous system tissue, mammary gland tissue, taste bud tissue, ovary tissue, inner ear tissue (including cochlear and vestibular tissues), hair follicles, pancreas tissue, retina tissue, cornea tissue, heart tissue or lung tissue, and the targeting module binds to a tissue-specific cell surface molecule (e.g., a cell surface receptor) preferentially expressed on bone tissue, liver tissue, skin tissue, stomach tissue, intestine tissue, oral mucosa tissue, kidney tissue, central nervous system tissue, mammary gland tissue, taste bud tissue, ovary tissue, inner ear tissue (including cochlear and vestibular tissues), hair follicles, pancreas tissue, retina tissue, cornea tissue, heart tissue or lung tissue, respectively.

[0147] The targeting module may bind to any cell type, e.g., any cell within any tissue, organ or animal, including but not limited to mammals, such as humans. In certain embodiments, the tissue-specific WNT surrogate-signal enhancing combination molecule binds to specific cell types, e.g., specific cell types associated with a target tissue. For example, in liver tissue, the targeting module may bind to hepatocytes, precursors and stem cells of hepatocytes, biliary tract cells, and/or endothelial or other vascular cells. For example, in bone tissue, the targeting module may bind osteoblasts, precursors of osteoblasts, mesenchymal stem cells, stem cells and precursor cells that give rise to bone, cartilage and/or other cells present in bone tissue. Cell types present in various tissues, including but not limited to the tissues described herein, are known in the art, and in various embodiments, the tissue-specific WNT signal enhancing molecules described herein may bind any of them.

### VII. WNT Enhancer Structures (RSPO Mimetics)

[0148] In some embodiments, an RSPO mimetic having the activities of RSPO is desirable. In certain embodiments, the disclosure provides RSPO mimetics, comprising: (i) either a FZD binding domain or an LRP5/6 binding domain (but not both); and an E3 ligase binding domain. The WNT enhancers can operate as RSPO mimetics. In certain embodiments, the RSPO mimetic can have the structures depicted in FIG. 2A, 2D, or 2E. In particular embodiments, an RSPO mimetic will have mutant RSPO (RSPO2RA) and at least one binding domain specific for a WNT receptor (e.g., FZD or LRP). The RSPO mimetic with a FZD binding domain can function as a tissue or cell specific RSPO mimetic if the FZD receptor expression is limited to a particular organ, tissue, or cell.

### VIII. Linkers

[0149] In certain embodiments, the WNT surrogate, enhancer, and/or targeting modules are bound or fused directly to each other, whereas in other embodiments, they are separated by a linker, e.g., a polypeptide linker, or a non-peptidyl linker, etc. In particular embodiments, a linker is an Fc linker, e.g., a region of an antibody Fc domain capable of dimerizing with another Fc linker, e.g., via one or more disulfide bonds. In another particular embodiment, a linker is albumin, e.g., human serum albumin, where the targeting and action modules are on the N- and C-termini of albumin.

[0150] In certain embodiments, particularly when joining two polypeptides, the linker is made up of amino acids linked together by peptide bonds. In particular embodiments, the linker comprises, in length, from 1 up to about 40 amino acid residues, from 1 up to about 30 amino acid residues, from 1 up to about 20 amino acid residues, from 5 up to about 15 amino acid residues, or from 1 to about 10 amino acid residues, e.g., 3, 4, 5, 6, 7, 8, 9, 10, 11, 12, 13, 14, or 15 amino acids. In certain embodiments, the amino acid residues in the linker are from among the twenty canonical amino acids, and in certain embodiments, selected from cysteine, glycine, alanine, proline, asparagine, glutamine, and/or serine. In certain embodiments, a linker comprises one or more non-natural amino acids. In some embodiments, a peptidyl linker is made up of a majority of amino acids that are sterically unhindered, such as glycine, serine, and alanine linked by a peptide bond. Certain linkers include polyglycines, polyserines, and polyalanines, or combinations of any of these. Some exemplary peptidyl linkers are poly(Gly)1-8, particularly (Gly)3, (Gly)4 (SEQ ID NO: 1), (Gly)5 (SEQ ID NO: 2), (Gly)6 (SEQ ID NO: 3), (Gly)7 (SEQ ID NO: 4), and (Gly)8 (SEQ ID NO: 5) as well as, poly(Gly)4 Ser (SEQ ID NO: 6), poly(Gly-Ala)2 (SEQ ID NO: 7), poly(Gly-Ala)3 (SEQ ID NO: 8), poly(Gly-Ala)4 (SEQ ID NO: 9) and poly(Ala)1-8 (SEQ ID NO: 10-14). Other specific examples of peptidyl linkers include (Gly)5Lys (SEQ ID NO: 15), and (Gly)5LysArg (SEQ ID NO: 16). To explain the above nomenclature, for example, (Gly)3Lys(Gly)4 means Gly-Gly-Gly-Lys-Gly-Gly-Gly-Gly (SEQ ID NO: 17). Other combinations of Gly and Ala are also useful. Additionally, a peptidyl linker can also comprise a non-peptidyl segment such as a 6 carbon aliphatic molecule of the formula —CH2-CH2-CH2-CH2-CH2-CH2-. The peptidyl linkers can be altered to form derivatives as described herein.

[0151] Illustrative non-peptidyl linkers include, for example, alkyl linkers such as —NH—(CH2) s-C(O)—, wherein s=2-20. These alkyl linkers may further be substituted by any non-sterically hindering group such as lower alkyl (e.g., C1-C6) lower acyl, halogen (e.g., Cl, Br), CN, NH2, phenyl, etc. Non-peptide portions of the inventive composition of matter, such as non-peptidyl linkers or non-peptide half-life extending moieties can be synthesized by conventional organic chemistry reactions. Chemical groups that find use in linking binding domains include carbamate; amide (amine plus carboxylic acid); ester (alcohol plus carboxylic acid), thioether (haloalkane plus sulfhydryl; maleimide plus sulfhydryl), Schiff s base (amine plus aldehyde), urea (amine plus isocyanate), thiourea (amine plus isothiocyanate), sulfonamide (amine plus sulfonyl chloride), disulfide; hydrazone, lipids, and the like, as known in the art.

[0152] The linkage between domains may comprise spacers, e.g. alkyl spacers, which may be linear or branched, usually linear, and may include one or more unsaturated bonds; usually having from one to about 300 carbon atoms; more usually from about one to 25 carbon atoms; and may be from about three to 12 carbon atoms. Spacers of this type may also comprise heteroatoms or functional groups, including amines, ethers, phosphodiesters, and the like. Specific structures of interest include: (CH₂CH₂O)n where n is from 1 to about 12; (CH₂CH₂NH)n, where n is from 1 to about 12; [(CH₂)n(C═O)NH(CH₂)m]_{z}, where n and m are from 1 to about 6, and z is from 1 to about 10; [(CH₂)nOPO₃(CH₂)m]_{z} where n and m are from 1 to about 6, and z is from 1 to about 10. Such linkers may include polyethylene glycol, which may be linear or branched.

[0153] In certain embodiments, the domains may be joined through a homo- or heterobifunctional linker. Illustrative entities include: azidobenzoyl hydrazide, N-[4-(p-azidosalicylamino)butyl]-3′-[2′-pyridyldithio]propionamide), bis-sulfosuccinimidyl suberate, dimethyladipimidate, disuccinimidyltartrate, N-γ-maleimidobutyryloxysuccinimide ester, N-hydroxy sulfosuccinimidyl-4-azidobenzoate, N-succinimidyl [4-azidophenyl]-1,3′-dithiopropionate, N-succinimidyl [4-iodoacetyl]aminobenzoate, glutaraldehyde, NHS-PEG-MAL; succinimidyl 4-[N-maleimidomethyl]cyclohexane-1-carboxylate; 3-(2-pyridyldithio)propionic acid N-hydroxysuccinimide ester (SPDP); N, N′-(1,3-phenylene) bismaleimide; N, N′-ethylene-bis-(iodoacetamide); or 4-(N-maleimidomethyl)-cyclohexane-1-carboxylic acid N-hydroxysuccinimide ester (SMCC); m-maleimidobenzoyl-N-hydroxysuccinimide ester (MBS), and succinimide 4-(p-maleimidophenyl)butyrate (SMPB), an extended chain analog of MBS. In certain embodiments, the succinimidyl group of these cross-linkers reacts with a primary amine, and the thiol-reactive maleimide forms a covalent bond with the thiol of a cysteine residue.

[0154] Other reagents useful include: homobifunctional cross-linking reagents including bismaleimidohexane (“BMH”); p,p′-difluoro-m,m′-dinitrodiphenylsulfone (which forms irreversible cross-linkages with amino and phenolic groups); dimethyl adipimidate (which is specific for amino groups); phenol-1,4-disulfonylchloride (which reacts principally with amino groups); hexamethylenediisocyanate or diisothiocyanate, or azophenyl-p-diisocyanate (which reacts principally with amino groups); disdiazobenzidine (which reacts primarily with tyrosine and histidine); O-benzotriazolyloxy tetramethuluronium hexafluorophosphate (HATU), dicyclohexyl carbodiimde, bromo-tris (pyrrolidino) phosphonium bromide (PyBroP); N,N-dimethylamino pyridine (DMAP); 4-pyrrolidino pyridine; N-hydroxy benzotriazole; and the like.

### IX. Nucleic Acids and Polypeptides

[0155] The present invention further provides in certain embodiments an isolated nucleic acid encoding a polypeptide present in a molecule disclosed herein, e.g., a WNT surrogate, a WNT enhancer, or a WNT super agonist. Nucleic acids include DNA and RNA. These and related embodiments may include polynucleotides encoding antibody fragments that bind one or more co-receptors. The term “isolated polynucleotide” as used herein shall mean a polynucleotide of genomic, cDNA, or synthetic origin, or some combination thereof, which by virtue of its origin, the isolated polynucleotide: (1) is not associated with all or a portion of a polynucleotide in which the isolated polynucleotide is found in nature; (2) is linked to a polynucleotide to which it is not linked in nature, or (3) does not occur in nature as part of a larger sequence. An isolated polynucleotide may include naturally occurring and/or artificial sequences.

[0156] As will be understood by those skilled in the art, polynucleotides may include genomic sequences, extra-genomic and plasmid-encoded sequences and smaller engineered gene segments that express, or may be adapted to express, proteins, polypeptides, peptides and the like. Such segments may be naturally isolated, or modified synthetically by the skilled person.

[0157] As will be also recognized by the skilled artisan, polynucleotides may be single-stranded (coding or antisense) or double-stranded, and may be DNA (genomic, cDNA or synthetic) or RNA molecules. RNA molecules may include HnRNA molecules, which contain introns and correspond to a DNA molecule in a one-to-one manner, and mRNA molecules, which do not contain introns. Additional coding or non-coding sequences may, but need not, be present within a polynucleotide according to the present disclosure, and a polynucleotide may, but need not, be linked to other molecules and/or support materials. Polynucleotides may comprise a native sequence or may comprise a sequence that encodes a variant or derivative of such a sequence.

[0158] It will be appreciated by those of ordinary skill in the art that, as a result of the degeneracy of the genetic code, there are many nucleotide sequences that encodes an antibody as described herein. Some of these polynucleotides bear minimal sequence identity to the nucleotide sequence of the native or original polynucleotide sequence encoding a polypeptide within a WNT surrogate, a WNT enhancer, or a WNT super agonist. Nonetheless, polynucleotides that vary due to differences in codon usage are expressly contemplated by the present disclosure. In certain embodiments, sequences that have been codon-optimized for mammalian expression are specifically contemplated.

[0159] Therefore, in another embodiment of the invention, a mutagenesis approach, such as site-specific mutagenesis, may be employed for the preparation of variants and/or derivatives of the polypeptides described herein. By this approach, specific modifications in a polypeptide sequence can be made through mutagenesis of the underlying polynucleotides that encode them. These techniques provide a straightforward approach to prepare and test sequence variants, for example, incorporating one or more of the foregoing considerations, by introducing one or more nucleotide sequence changes into the polynucleotide.

[0160] Site-specific mutagenesis allows the production of mutants through the use of specific oligonucleotide sequences which encode the DNA sequence of the desired mutation, as well as a sufficient number of adjacent nucleotides, to provide a primer sequence of sufficient size and sequence complexity to form a stable duplex on both sides of the deletion junction being traversed. Mutations may be employed in a selected polynucleotide sequence to improve, alter, decrease, modify, or otherwise change the properties of the polynucleotide itself, and/or alter the properties, activity, composition, stability, or primary sequence of the encoded polypeptide.

[0161] In certain embodiments, the inventors contemplate the mutagenesis of the polynucleotide sequences that encode a polypeptide present in a molecule disclosed herein, e.g., a WNT surrogate, a WNT enhancer, or a WNT super agonist, to alter one or more properties of the encoded polypeptide, such as the binding affinity, or the function of a particular Fc region, or the affinity of the Fc region for a particular FcγR. The techniques of site-specific mutagenesis are well-known in the art, and are widely used to create variants of both polypeptides and polynucleotides. For example, site-specific mutagenesis is often used to alter a specific portion of a DNA molecule. In such embodiments, a primer comprising typically about 14 to about 25 nucleotides or so in length is employed, with about 5 to about 10 residues on both sides of the junction of the sequence being altered.

[0162] As will be appreciated by those of skill in the art, site-specific mutagenesis techniques have often employed a phage vector that exists in both a single stranded and double stranded form. Typical vectors useful in site-directed mutagenesis include vectors such as the M13 phage. These phages are readily commercially-available and their use is generally well-known to those skilled in the art. Double-stranded plasmids are also routinely employed in site directed mutagenesis that eliminates the step of transferring the gene of interest from a plasmid to a phage.

[0163] The preparation of sequence variants of the selected peptide-encoding DNA segments using site-directed mutagenesis provides a means of producing potentially useful species and is not meant to be limiting as there are other ways in which sequence variants of peptides and the DNA sequences encoding them may be obtained. For example, recombinant vectors encoding the desired peptide sequence may be treated with mutagenic agents, such as hydroxylamine, to obtain sequence variants. Specific details regarding these methods and protocols are found in the teachings of Maloy et al., 1994; Segal, 1976; Prokop and Bajpai, 1991; Kuby, 1994; and Maniatis et al., 1982, each incorporated herein by reference, for that purpose.

[0164] In many embodiments, one or more nucleic acids encoding a polypeptide of a molecule disclosed herein, e.g., a WNT surrogate, a WNT enhancer, or a WNT super agonist, are introduced directly into a host cell, and the cell incubated under conditions sufficient to induce expression of the encoded polypeptides.

[0165] The surrogate polypeptides of this disclosure may be prepared using standard techniques well known to those of skill in the art in combination with the polypeptide and nucleic acid sequences provided herein. The polypeptide sequences may be used to determine appropriate nucleic acid sequences encoding the particular polypeptide disclosed thereby. The nucleic acid sequence may be optimized to reflect particular codon “preferences” for various expression systems according to standard methods well known to those of skill in the art.

[0166] According to certain related embodiments there is provided a recombinant host cell that comprises one or more constructs as described herein, e.g., a vector comprising a nucleic acid encoding a surrogate molecule or polypeptide thereof, and a method of production of the encoded product, which method comprises expression from encoding nucleic acid therefor. Expression may conveniently be achieved by culturing under appropriate conditions recombinant host cells containing the nucleic acid. Following production by expression, an antibody or antigen-binding fragment thereof, may be isolated and/or purified using any suitable technique, and then used as desired.

[0167] Polypeptides, and encoding nucleic acid molecules and vectors, may be isolated and/or purified, e.g. from their natural environment, in substantially pure or homogeneous form, or, in the case of nucleic acid, free or substantially free of nucleic acid or genes of origin other than the sequence encoding a polypeptide with the desired function. Nucleic acid may comprise DNA or RNA and may be wholly or partially synthetic. Reference to a nucleotide sequence as set out herein encompasses a DNA molecule with the specified sequence, and encompasses a RNA molecule with the specified sequence in which U is substituted for T, unless context requires otherwise.

[0168] Systems for cloning and expression of a polypeptide in a variety of different host cells are well known. Suitable host cells include bacteria, mammalian cells, yeast and baculovirus systems. Mammalian cell lines available in the art for expression of a heterologous polypeptide include Chinese hamster ovary cells, HeLa cells, baby hamster kidney cells, NSO mouse melanoma cells and many others. A common, preferred bacterial host is E. coli. Polypeptides present within a molecule disclosed herein, e.g., a WNT surrogate, a WNT enhancer, or a WNT super agonist, may be recombinantly produced in prokaryotic or eukaryotic cells.

[0169] The expression of polypeptides, e.g., antibodies and antigen-binding fragments thereof, in prokaryotic cells such as E. coli is well established in the art. For a review, see for example Pluckthun, A. Bio/Technology 9: 545-551 (1991). Expression in eukaryotic cells in culture is also available to those skilled in the art as an option for production of antibodies or antigen-binding fragments thereof, see recent reviews, for example Ref, M. E. (1993) Curr. Opinion Biotech. 4: 573-576; Trill J. J. et al. (1995) Curr. Opinion Biotech 6: 553-560.

[0170] Suitable vectors can be chosen or constructed, containing appropriate regulatory sequences, including promoter sequences, terminator sequences, polyadenylation sequences, enhancer sequences, marker genes and other sequences as appropriate. Vectors may be plasmids, viral e.g. phage, or phagemid, as appropriate. For further details see, for example, Molecular Cloning: a Laboratory Manual: 2nd edition, Sambrook et al., 1989, Cold Spring Harbor Laboratory Press. Many known techniques and protocols for manipulation of nucleic acid, for example in preparation of nucleic acid constructs, mutagenesis, sequencing, introduction of DNA into cells and gene expression, and analysis of proteins, are described in detail in Current Protocols in Molecular Biology, Second Edition, Ausubel et al. eds., John Wiley & Sons, 1992, or subsequent updates thereto.

[0171] The present invention also provides, in certain embodiments, a method which comprises using a construct as stated above in an expression system in order to express a particular polypeptide present within a molecule disclosed herein, e.g., a WNT surrogate, a WNT enhancer, or a WNT super agonist. The term “transduction” is used to refer to the transfer of genes from one bacterium to another, usually by a phage.

[0172] Amino acid sequence modification(s) of any of the polypeptides described herein are contemplated. For example, it may be desirable to improve the binding affinity and/or other biological properties of the surrogate molecule. For example, amino acid sequence variants of a molecule disclosed herein, e.g., a WNT surrogate, a WNT enhancer, or a WNT super agonist, may be prepared by introducing appropriate nucleotide changes into a polynucleotide that encodes the antibody, or a chain thereof, or by peptide synthesis. Such modifications include, for example, deletions from, and/or insertions into and/or substitutions of, residues within the amino acid sequences of the antibody. Any combination of deletion, insertion, and substitution may be made to arrive at the final surrogate molecule, provided that the final construct possesses the desired characteristics (e.g., high affinity binding to one or more co-receptors). The amino acid changes also may alter post-translational processes of the antibody, such as changing the number or position of glycosylation sites. Any of the variations and modifications described above for polypeptides of the present invention may be included in antibodies of the present invention.

[0173] The present disclosure provides variants of any of the polypeptides (e.g., polypeptides of surrogate molecules, super agonists, or antibodies or antigen-binding fragments thereof) disclosed herein. In certain embodiments, a variant has at least 90%, at least 95%, at least 98%, or at least 99% identity to a polypeptide disclosed herein. In certain embodiments, such variant polypeptides bind to one or more first co-receptors, and/or to one or more second co-receptors, and/or to an E3 ligase at least about 50%, at least about 70%, and in certain embodiments, at least about 90% as well as a molecule specifically set forth herein. In further embodiments, such variant molecules bind to one or more first co-receptor, and/or to one or more second co-receptor, with greater affinity than the molecules set forth herein, for example, that bind quantitatively at least about 105%, 106%, 107%, 108%, 109%, or 110% as well as an antibody sequence specifically set forth herein.

[0174] In particular embodiments, a molecule disclosed herein, e.g., a WNT surrogate, a WNT enhancer, or a WNT super agonist, or a binding region thereof, e.g., a Fab, scFv, or VHH may comprise: a) a heavy chain variable region comprising: i. a CDR1 region that is identical in amino acid sequence to the heavy chain CDR1 region of a selected antibody described herein; ii. a CDR2 region that is identical in amino acid sequence to the heavy chain CDR2 region of the selected antibody; and iii. a CDR3 region that is identical in amino acid sequence to the heavy chain CDR3 region of the selected antibody; and/or b) a light chain variable domain comprising: i. a CDR1 region that is identical in amino acid sequence to the light chain CDR1 region of the selected antibody; ii. a CDR2 region that is identical in amino acid sequence to the light chain CDR2 region of the selected antibody; and iii. a CDR3 region that is identical in amino acid sequence to the light chain CDR3 region of the selected antibody; wherein the antibody specifically binds a selected target. In a further embodiment, the antibody, or antigen-binding fragment thereof, is a variant antibody or antigen-binding fragment thereof wherein the variant comprises a heavy and light chain identical to the selected antibody except for up to 8, 9, 10, 11, 12, 13, 14, 15, or more amino acid substitutions in the CDR regions of the VH and VL regions. In this regard, there may be 1, 2, 3, 4, 5, 6, 7, 8, or in certain embodiments, 9, 10, 11, 12, 13, 14, 15 more amino acid substitutions in the CDR regions of the selected antibody. Substitutions may be in CDRs either in the VH and/or the VL regions. (See e.g., Muller, 1998, Structure 6:1153-1167).

[0175] In particular embodiments, a molecule disclosed herein, e.g., a WNT surrogate, a WNT enhancer, or a WNT super agonist, or a binding region thereof, e.g., a Fab, scFv, or VHH/sdAb, may have: a) a heavy chain variable region having an amino acid sequence that is at least 80% identical, at least 95% identical, at least 90%, at least 95% or at least 98% or 99% identical, to the heavy chain variable region of an antibody or antigen-binding fragments thereof described herein; and/or b) a light chain variable region having an amino acid sequence that is at least 80% identical, at least 85%, at least 90%, at least 95% or at least 98% or 99% identical, to the light chain variable region of an antibody or antigen-binding fragments thereof described herein.

[0176] A polypeptide has a certain percent “sequence identity” to another polypeptide, meaning that, when aligned, that percentage of amino acids are the same when comparing the two sequences. Sequence similarity can be determined in a number of different manners. To determine sequence identity, sequences can be aligned using the methods and computer programs, including BLAST, available over the world wide web at ncbi.nlm.nih.gov/BLAST/. Another alignment algorithm is FASTA, available in the Genetics Computing Group (GCG) package, from Madison, Wis., USA, a wholly owned subsidiary of Oxford Molecular Group, Inc. Other techniques for alignment are described in Methods in Enzymology, vol. 266: Computer Methods for Macromolecular Sequence Analysis (1996), ed. Doolittle, Academic Press, Inc., a division of Harcourt Brace & Co., San Diego, Calif., USA. Of particular interest are alignment programs that permit gaps in the sequence. The Smith-Waterman is one type of algorithm that permits gaps in sequence alignments. See Meth. Mol. Biol. 70: 173-187 (1997). Also, the GAP program using the Needleman and Wunsch alignment method can be utilized to align sequences. See J. Mol. Biol. 48: 443-453 (1970).

[0177] Of interest is the BestFit program using the local homology algorithm of Smith and Waterman (Advances in Applied Mathematics 2: 482-489 (1981) to determine sequence identity. The gap generation penalty will generally range from 1 to 5, usually 2 to 4 and in many embodiments will be 3. The gap extension penalty will generally range from about 0.01 to 0.20 and in many instances will be 0.10. The program has default parameters determined by the sequences inputted to be compared. Preferably, the sequence identity is determined using the default parameters determined by the program. This program is available also from Genetics Computing Group (GCG) package, from Madison, Wis., USA.

[0178] Another program of interest is the FastDB algorithm. FastDB is described in Current Methods in Sequence Comparison and Analysis, Macromolecule Sequencing and Synthesis, Selected Methods and Applications, pp. 127-149, 1988, Alan R. Liss, Inc. Percent sequence identity is calculated by FastDB based upon the following parameters: Mismatch Penalty: 1.00; Gap Penalty: 1.00; Gap Size Penalty: 0.33; and Joining Penalty: 30.0.

[0179] In particular embodiments, a molecule disclosed herein, e.g., a WNT surrogate, a WNT enhancer, or a WNT super agonist, or a binding region thereof, e.g., a Fab, scFv, or VHH may comprise: a) a heavy chain variable region comprising: i. a CDR1 region that is identical in amino acid sequence to the heavy chain CDR1 region of a selected antibody described herein; ii. a CDR2 region that is identical in amino acid sequence to the heavy chain CDR2 region of the selected antibody; and iii. a CDR3 region that is identical in amino acid sequence to the heavy chain CDR3 region of the selected antibody; and b) a light chain variable domain comprising: i. a CDR1 region that is identical in amino acid sequence to the light chain CDR1 region of the selected antibody; ii. a CDR2 region that is identical in amino acid sequence to the light chain CDR2 region of the selected antibody; and iii. a CDR3 region that is identical in amino acid sequence to the light chain CDR3 region of the selected antibody; wherein the antibody specifically binds a selected target (e.g., a FZD receptor, such as FZD1). In a further embodiment, the antibody, or antigen-binding fragment thereof, is a variant antibody wherein the variant comprises a heavy and light chain identical to the selected antibody except for up to 8, 9, 10, 11, 12, 13, 14, 15, or more amino acid substitutions in the CDR regions of the VH and VL regions. In this regard, there may be 1, 2, 3, 4, 5, 6, 7, 8, or in certain embodiments, 9, 10, 11, 12, 13, 14, 15 more amino acid substitutions in the CDR regions of the selected antibody. Substitutions may be in CDRs either in the VH and/or the VL regions. (See e.g., Muller, 1998, Structure 6:1153-1167).

[0180] Determination of the three-dimensional structures of representative polypeptides (e.g., variant FZD binding regions or LRP5/6 binding regions of WNT surrogate molecules as provided herein) may be made through routine methodologies such that substitution, addition, deletion or insertion of one or more amino acids with selected natural or non-natural amino acids can be virtually modeled for purposes of determining whether a so derived structural variant retains the space-filling properties of presently disclosed species. See, for instance, Donate et al., 1994 Prot. Sci. 3:2378; Bradley et al., Science 309: 1868-1871 (2005); Schueler-Furman et al., Science 310:638 (2005); Dietz et al., Proc. Nat. Acad. Sci. USA 103:1244 (2006); Dodson et al., Nature 450:176 (2007); Qian et al., Nature 450:259 (2007); Raman et al. Science 327:1014-1018 (2010). Some additional non-limiting examples of computer algorithms that may be used for these and related embodiments, such as for rational design of binding regions include VMD which is a molecular visualization program for displaying, animating, and analyzing large biomolecular systems using 3-D graphics and built-in scripting (see the website for the Theoretical and Computational Biophysics Group, University of Illinois at Urbana-Champagne, at ks.uiuc.edu/Research/vmd/. Many other computer programs are known in the art and available to the skilled person and which allow for determining atomic dimensions from space-filling models (van der Waals radii) of energy-minimized conformations; GRID, which seeks to determine regions of high affinity for different chemical groups, thereby enhancing binding, Monte Carlo searches, which calculate mathematical alignment, and CHARMM (Brooks et al. (1983) J. Comput. Chem. 4:187-217) and AMBER (Weiner et al (1981) J. Comput. Chem. 106: 765), which assess force field calculations, and analysis (see also, Eisenfield et al. (1991) Am. J. Physiol. 261: C376-386; Lybrand (1991) J. Pharm. Belg. 46:49-54; Froimowitz (1990) Biotechniques 8:640-644; Burbam et al. (1990) Proteins 7:99-111; Pedersen (1985) Environ. Health Perspect. 61:185-190; and Kini et al. (1991) J. Biomol. Struct. Dyn. 9:475-488). A variety of appropriate computational computer programs are also commercially available, such as from Schrödinger (Munich, Germany).

[0181] The accompanying Examples set forth a variety of polypeptide sequences that may be present within WNT surrogates, WNT super agonists, and WNT enhancers. In particular, Table 3 provides sequences of polypeptides present in illustrative WNT surrogates and WNT enhancers, and Table 4 provides sequences of polypeptides present in illustrative WNT super agonists and WNT enhancers. These tables also provide the structure of each of the molecules disclosed, which is listed or may be readily discerned from the name of the molecule. Illustrative binding domains present within the various molecules are provided in Table 2 with the full sequences shown in Tables 3 and 4. The various binding domains and molecules described in the Examples may be modified or combined in other orientations or configurations, including but not limited to any of the various configurations shown in the Examples or Figures. For example, the positions of the FZD binding domain and the LRP5/6 binding domain may be switched in any of the polypeptides present within the structures depicted. The disclosure further includes polypeptide variants of any of the polypeptides or binding domains thereof disclosed herein, such polypeptide variants having at least 70%, at least 75%, at least 80%, at least 85%, at least 90%, at least 95%, at least 98%, or at least 99% sequence identity to a polypeptide or binding domain thereof disclosed herein.

### X. Compositions

[0182] Pharmaceutical compositions comprising a surrogate molecule described herein and one or more pharmaceutically acceptable diluent, carrier, or excipient are also disclosed.

[0183] In further embodiments, pharmaceutical compositions comprising a polynucleotide comprising a nucleic acid sequence encoding a surrogate molecule described herein and one or more pharmaceutically acceptable diluent, carrier, or excipient are also disclosed. In particular embodiments, the pharmaceutical composition further comprises one or more polynucleotides comprising a nucleic acid sequence encoding a naturally occurring co-receptor ligand polypeptide. In certain embodiments, the polynucleotides are DNA or mRNA, e.g., a modified mRNA. In particular embodiments, the polynucleotides are modified mRNAs further comprising a 5′ cap sequence and/or a 3′ tailing sequence, e.g., a polyA tail. In other embodiments, the polynucleotides are expression cassettes comprising a promoter operatively linked to the coding sequences. In certain embodiments, the nucleic acid sequence encoding the surrogate molecule and the nucleic acid sequence encoding naturally occurring co-receptor ligand polypeptide are present in the same polynucleotide.

[0184] In further embodiments, pharmaceutical compositions comprising an expression vector, e.g., a viral vector, comprising a polynucleotide comprising a nucleic acid sequence encoding a surrogate molecule described herein and one or more pharmaceutically acceptable diluent, carrier, or excipient are also disclosed. In particular embodiments, the pharmaceutical composition further comprises an expression vector, e.g., a viral vector, comprising a polynucleotide comprising a nucleic acid sequence encoding a naturally occurring co-receptor ligand polypeptide. In certain embodiments, the nucleic acid sequence encoding the surrogate molecule and the nucleic acid sequence encoding the naturally occurring co-receptor ligand polypeptide are present in the same polynucleotide, e.g., expression cassette.

[0185] The present invention further contemplates a pharmaceutical composition comprising a cell comprising an expression vector comprising a polynucleotide comprising a promoter operatively linked to a nucleic acid encoding a surrogate molecule and one or more pharmaceutically acceptable diluent, carrier, or excipient. In particular embodiments, the pharmaceutical composition further comprises a cell comprising an expression vector comprising a polynucleotide comprising a promoter operatively linked to a nucleic acid sequence encoding a polypeptide corresponding to the natural ligand of the receptors. In particular embodiments, the cell is a heterologous cell or an autologous cell obtained from the subject to be treated. In particular embodiments, the cell is a stem cell, e.g., an adipose-derived stem cell or a hematopoietic stem cell.

[0186] The subject molecules, alone or in combination, can be combined with pharmaceutically-acceptable carriers, diluents, excipients and reagents useful in preparing a formulation that is generally safe, non-toxic, and desirable, and includes excipients that are acceptable for mammalian, e.g., human or primate, use. Such excipients can be solid, liquid, semisolid, or, in the case of an aerosol composition, gaseous. Examples of such carriers, diluents and excipients include, but are not limited to, water, saline, Ringer's solutions, dextrose solution, and 5% human serum albumin. Supplementary active compounds can also be incorporated into the formulations. Solutions or suspensions used for the formulations can include a sterile diluent such as water for injection, saline solution, fixed oils, polyethylene glycols, glycerine, propylene glycol or other synthetic solvents; antibacterial compounds such as benzyl alcohol or methyl parabens; antioxidants such as ascorbic acid or sodium bisulfite; chelating compounds such as ethylenediaminetetraacetic acid (EDTA); buffers such as acetates, citrates or phosphates; detergents such as Tween 20 to prevent aggregation; and compounds for the adjustment of tonicity such as sodium chloride or dextrose. The pH can be adjusted with acids or bases, such as hydrochloric acid or sodium hydroxide. In particular embodiments, the pharmaceutical compositions are sterile.

[0187] Pharmaceutical compositions may further include sterile aqueous solutions or dispersions and sterile powders for the extemporaneous preparation of sterile injectable solutions or dispersion. For intravenous administration, suitable carriers include physiological saline, bacteriostatic water, or phosphate buffered saline (PBS). In some cases, the composition is sterile and should be fluid such that it can be drawn into a syringe or delivered to a subject from a syringe. In certain embodiments, it is stable under the conditions of manufacture and storage and is preserved against the contaminating action of microorganisms such as bacteria and fungi. The carrier can be, e.g., a solvent or dispersion medium containing, for example, water, ethanol, polyol (for example, glycerol, propylene glycol, and liquid polyethylene glycol, and the like), and suitable mixtures thereof. The proper fluidity can be maintained, for example, by the use of a coating such as lecithin, by the maintenance of the required particle size in the case of dispersion and by the use of surfactants. Prevention of the action of microorganisms can be achieved by various antibacterial and antifungal agents, for example, parabens, chlorobutanol, phenol, ascorbic acid, thimerosal, and the like. In many cases, it will be preferable to include isotonic agents, for example, sugars, polyalcohols such as mannitol, sorbitol, sodium chloride in the composition. Prolonged absorption of the internal compositions can be brought about by including in the composition an agent which delays absorption, for example, aluminum monostearate and gelatin.

[0188] Sterile solutions can be prepared by incorporating the surrogate molecule (or encoding polynucleotide or cell comprising the same) in the required amount in an appropriate solvent with one or a combination of ingredients enumerated above, as required, followed by filtered sterilization. Generally, dispersions are prepared by incorporating the active compound into a sterile vehicle that contains a basic dispersion medium and the required other ingredients from those enumerated above. In the case of sterile powders for the preparation of sterile injectable solutions, methods of preparation are vacuum drying and freeze-drying that yields a powder of the active ingredient plus any additional desired ingredient from a previously sterile-filtered solution thereof.

[0189] In one embodiment, the pharmaceutical compositions are prepared with carriers that will protect the antibody or antigen-binding fragment thereof against rapid elimination from the body, such as a controlled release formulation, including implants and microencapsulated delivery systems. Biodegradable, biocompatible polymers can be used, such as ethylene vinyl acetate, polyanhydrides, polyglycolic acid, collagen, polyorthoesters, and polylactic acid. Methods for preparation of such formulations will be apparent to those skilled in the art. The materials can also be obtained commercially. Liposomal suspensions can also be used as pharmaceutically acceptable carriers. These can be prepared according to methods known to those skilled in the art.

[0190] It may be advantageous to formulate the pharmaceutical compositions in dosage unit form for ease of administration and uniformity of dosage. Dosage unit form as used herein refers to physically discrete units suited as unitary dosages for the subject to be treated; each unit containing a predetermined quantity of active antibody or antigen-binding fragment thereof calculated to produce the desired therapeutic effect in association with the required pharmaceutical carrier. The specification for the dosage unit forms are dictated by and directly dependent on the unique characteristics of the antibody or antigen-binding fragment thereof and the particular therapeutic effect to be achieved, and the limitations inherent in the art of compounding such an active antibody or antigen-binding fragment thereof for the treatment of individuals.

[0191] The pharmaceutical compositions can be included in a container, pack, or dispenser, e.g. syringe, e.g. a prefilled syringe, together with instructions for administration.

[0192] The pharmaceutical compositions of the invention encompass any pharmaceutically acceptable salts, esters, or salts of such esters, or any other compound which, upon administration to an animal comprising a human, is capable of providing (directly or indirectly) the biologically active antibody or antigen-binding fragment thereof.

[0193] The present invention includes pharmaceutically acceptable salts of a WNT surrogate molecule described herein. The term “pharmaceutically acceptable salt” refers to physiologically and pharmaceutically acceptable salts of the compounds of the invention: i.e., salts that retain the desired biological activity of the parent compound and do not impart undesired toxicological effects thereto. A variety of pharmaceutically acceptable salts are known in the art and described, e.g., in “Remington's Pharmaceutical Sciences”, 17th edition, Alfonso R. Gennaro (Ed.), Mark Publishing Company, Easton, Pa., USA, 1985 (and more recent editions thereof), in the “Encyclopaedia of Pharmaceutical Technology”, 3rd edition, James Swarbrick (Ed.), Informa Healthcare USA (Inc.), NY, USA, 2007, and in J. Pharm. Sci. 66: 2 (1977). Also, for a review on suitable salts, see “Handbook of Pharmaceutical Salts: Properties, Selection, and Use” by Stahl and Wermuth (Wiley-VCH, 2002).

[0194] Pharmaceutically acceptable base addition salts are formed with metals or amines, such as alkali and alkaline earth metals or organic amines. Metals used as cations comprise sodium, potassium, magnesium, calcium, and the like. Amines comprise N—N′-dibenzylethylenediamine, chloroprocaine, choline, diethanolamine, dicyclohexylamine, ethylenediamine, N-methylglucamine, and procaine (see, for example, Berge et al., “Pharmaceutical Salts,” J. Pharma Sci., 1977, 66, 119). The base addition salts of said acidic compounds are prepared by contacting the free acid form with a sufficient amount of the desired base to produce the salt in the conventional manner. The free acid form may be regenerated by contacting the salt form with an acid and isolating the free acid in the conventional manner. The free acid forms differ from their respective salt forms somewhat in certain physical properties such as solubility in polar solvents, but otherwise the salts are equivalent to their respective free acid for purposes of the present invention.

[0195] In some embodiments, the pharmaceutical composition provided herein comprise a therapeutically effective amount of a WNT surrogate molecule or pharmaceutically acceptable salt thereof in admixture with a pharmaceutically acceptable carrier, diluent and/or excipient, for example saline, phosphate buffered saline, phosphate and amino acids, polymers, polyols, sugar, buffers, preservatives and other proteins. Exemplary amino acids, polymers and sugars and the like are octylphenoxy polyethoxy ethanol compounds, polyethylene glycol monostearate compounds, polyoxyethylene sorbitan fatty acid esters, sucrose, fructose, dextrose, maltose, glucose, mannitol, dextran, sorbitol, inositol, galactitol, xylitol, lactose, trehalose, bovine or human serum albumin, citrate, acetate, Ringer's and Hank's solutions, cysteine, arginine, carnitine, alanine, glycine, lysine, valine, leucine, polyvinylpyrrolidone, polyethylene and glycol. Preferably, this formulation is stable for at least six months at 4° C.

[0196] In some embodiments, the pharmaceutical composition provided herein comprises a buffer, such as phosphate buffered saline (PBS) or sodium phosphate/sodium sulfate, tris buffer, glycine buffer, sterile water and other buffers known to the ordinarily skilled artisan such as those described by Good et al. (1966) Biochemistry 5:467. The pH of the buffer may be in the range of 6.5 to 7.75, preferably 7 to 7.5, and most preferably 7.2 to 7.4.

### XI. Methods of Use

[0197] For illustrative purposes only, the WNT super agonist molecules, WNT surrogate molecules, and WNT enhancer molecules (RSPO mimetics), including those disclosed herein, can be used as to treat various diseases or disorders where tissue regeneration is necessary or beneficial. Subjects that may be treated include, but are not limited to, mammals, e.g., humans. Such diseases include, but are not limited to: increase bone growth or regeneration, bone grafting, healing of bone fractures, treatment of osteoporosis and osteoporotic fractures, vertebral compression fractures, spinal fusion, osseointegration of orthopedic devices, tendon-bone integration, tooth growth and regeneration, dental implantation, periodontal diseases, maxillofacial reconstruction, and osteonecrosis of the jaw. Also contemplated are: treatment of alopecia; enhancing regeneration of sensory organs, e.g. treatment of hearing loss, including internal and external auditory hair cells, treatment of vestibular hypofunction, treatment of macular degeneration, treatment of various retinopathies, including but not limited to vitreoretinopathy, diabetic retinopathy, other diseases of retinal degeneration, wet age-related macular degeneration (AMD), dry AMD, Fuchs' dystrophy, other cornea disease, etc.; treatment of stroke, traumatic brain injury, Alzheimer's disease, multiple sclerosis and other conditions affecting the blood brain barrier; treatment of spinal cord injuries, other spinal cord diseases. The compositions of this invention may also be used in treatment of oral mucositis, treatment of short bowel syndrome, inflammatory bowel diseases (IBD), other gastrointestinal disorders; treatment of metabolic syndrome, dyslipidemia, treatment of diabetes, treatment of pancreatitis, conditions where exocrine or endocrine pancreas tissues are damaged; conditions where enhanced epidermal regeneration is desired, e.g., epidermal wound healing, treatment of diabetic foot ulcers, syndromes involving tooth, nail, or dermal hypoplasia, etc., conditions where angiogenesis is beneficial; treatment of myocardial infarction, coronary artery disease, heart failure; enhanced growth of hematopoietic cells, e.g. enhancement of hematopoietic stem cell transplants from bone marrow, mobilized peripheral blood, treatment of immunodeficiencies, graft versus host diseases, etc.; treatment of acute kidney injuries, chronic kidney diseases; treatment of lung diseases, chronic obstructive pulmonary diseases (COPD), idiopathic pulmonary fibrosis (IPF) enhanced regeneration of lung tissues. The compositions of the present invention may also be used in enhanced regeneration of liver cells, e.g. liver regeneration, treatment of cirrhosis, enhancement of liver transplantations, treatment of acute liver failure, treatment of chronic liver diseases with hepatitis C or B virus infection or post-antiviral drug therapies, alcoholic liver diseases, alcoholic hepatitis, non-alcoholic liver diseases with steatosis or steatohepatitis, and the like. The compositions of this invention may treat diseases and disorders including, without limitation, conditions in which regenerative cell growth is desired.

[0198] In particular embodiments, the WNT super agonist molecules, WNT surrogate molecules, and WNT enhancer molecules (RSPO mimetics), including those disclosed herein, may be used to induce bone formation or increase bone density in a subject. For example, the subject may be administered an effective amount of a WNT super agonist molecule, WNT surrogate molecule, or WNT enhancer molecule. In particular embodiments, the subject is administered a WNT super agonist molecule or a WNT surrogate molecule comprising a FZD binding domain that binds to FZD5, FZD8, and FZD9.

[0199] In certain embodiments, the WNT super agonist molecules, WNT surrogate molecules, and WNT enhancer molecules (RSPO mimetics), including those disclosed herein, may be used for regenerating a salivary gland, inducing salivary gland growth or salivary gland tissue growth in a subject. The method may be used to treat hyposalivation or dry mouth in a subject. For example, the subject may be administered an effective amount of a WNT super agonist molecule, WNT surrogate molecule, or WNT enhancer molecule. In particular embodiments, the subject is administered a WNT super agonist molecule or a WNT surrogate molecule comprising a FZD binding domain that binds to FZD1, FZD2, and FZD7.

[0200] In certain embodiments, the WNT super agonist molecules, WNT surrogate molecules, and WNT enhancer molecules (RSPO mimetics), including those disclosed herein, may be used to preserve cells, tissues, organs or organoids, e.g., tissue or organs for transplantation. For example, a cell, tissue, organ, or organoid may be contacted with a WNT super agonist molecule, WNT surrogate molecule, or WNT enhancer molecule in vivo or ex vivo. In the context of preserving cells, tissue, or organs for transplantation, the cell, tissue, organ, or organoid may be contacted with a WNT super agonist molecule, WNT surrogate molecule, or WNT enhancer molecule while still in the donor (i.e., before removal from the donor) and/or after removal from the donor. The methods may maintain or enhance viability of the cell, tissue, or organ, for example, during storage or prior to transplantation into a recipient. In particular embodiments, the cells, tissue, or organ is perfused in a composition or solution comprising the WNT super agonist molecule, WNT surrogate molecule, or WNT enhancer molecule. In certain embodiments, certain organ tissue is contacted with a WNT super agonist molecule to maintain viability of that tissue. In particular embodiments, the organ tissue is donor organ tissue to be transplanted to a recipient in need thereof. In certain embodiments, donor organ tissue is perfused in vivo with a solution comprising a WNT super agonist molecule disclosed here, e.g., before the organ tissue is removed from the donor. In certain embodiments, donor organ tissue is perfused ex vivo with a solution comprising a WNT super agonist molecule disclosed here, e.g., during storage or during transport from a donor to a recipient. In particular embodiment, the organ tissue contacted with a Wnt signal enhancing molecule remains viable for transplantation for at least 10%, at least 20%, at least 50%, or at least 100% longer than if it was not contacted with the Wnt signal enhancing molecule. In certain embodiments the organ tissue is liver tissue.

[0201] In certain embodiments, the WNT super agonist molecules, WNT surrogate molecules, and WNT enhancer molecules (RSPO mimetics), including those disclosed herein, may be used for the expansion and/or maintenance of ex vivo tissue, e.g., skin tissue. In particular embodiments, the tissue is isolated from a donor or a patient. The tissue may be contacted with (e.g., maintained or cultured in the presence of) a WNT super agonist molecule, WNT surrogate molecule, or WNT enhancer molecule in vivo or ex vivo. In certain embodiments, the tissue is contacted ex vivo, e.g., by perfusion with a composition comprising a WNT super agonist molecule, WNT surrogate molecule, or WNT enhancer molecule.

[0202] In another embodiments, the WNT super agonist molecules, WNT surrogate molecules, and WNT enhancer molecules (RSPO mimetics), including those disclosed herein, may be used to generate or maintain an organoid or organoid culture. For example, an organoid culture may be contacted with a WNT super agonist molecule, WNT surrogate molecule, or WNT enhancer molecule, for example, by culturing the organoid in a medium comprising a WNT super agonist molecule, WNT surrogate molecule, or WNT enhancer molecule. In certain embodiments, an organoid culture is generated, grown, or maintained by contacting it with one or more WNT super agonist molecules disclosed herein. In particular embodiments, the WNT super agonist molecule is present in the culture media used to grow or maintain the organoid tissue.

[0203] In particular embodiments, a pharmaceutical composition is administered parenterally, e.g., intravenously, orally, rectally, or by injection. In some embodiments, it is administered locally, e.g., topically or intramuscularly. In some embodiments, a composition is administered to target tissues, e.g., to bone, joints, ear tissue, eye tissue, gastrointestinal tract, skin, a wound site or spinal cord.

[0204] Methods of the invention may be practiced in vivo or ex vivo. In some embodiments, the contacting of a target cell or tissue with a surrogate molecule is performed ex vivo, with subsequent implantation of the cells or tissues, e.g., activated stem or progenitor cells, into the subject. The skilled artisan can determine an appropriate site of and route of administration based on the disease or disorder being treated.

[0205] The dose and dosage regimen may depend upon a variety of factors readily determined by a physician, such as the nature of the disease or disorder, the characteristics of the subject, and the subject's history. In particular embodiments, the amount of a surrogate molecule administered or provided to the subject is in the range of about 0.01 mg/kg to about 50 mg/kg, 0.1 mg/kg to about 500 mg/kg, or about 0.1 mg/kg to about 50 mg/kg of the subject's body weight.

[0206] All of the above U.S. patents, U.S. patent application publications, U.S. patent applications, foreign patents, foreign patent applications and non-patent publications referred to in this specification and/or listed in the Application Data Sheet, are incorporated herein by reference, in their entirety.

[0207] From the foregoing it will be appreciated that, although specific embodiments of the invention have been described herein for purposes of illustration, various modifications may be made without deviating from the spirit and scope of the invention. Accordingly, the invention is not limited except as by the appended claims.

### EXAMPLES

[0208] The following examples are put forth so as to provide those of ordinary skill in the art with a complete disclosure and description of how to make and use the present invention, and are not intended to limit the scope of what the inventors regard as their invention nor are they intended to represent that the experiments below are all or the only experiments performed. Efforts have been made to ensure accuracy with respect to numbers used (e.g. amounts, temperature, etc.) but some experimental errors and deviations should be accounted for. Unless indicated otherwise, parts are parts by weight, molecular weight is weight average molecular weight, temperature is in degrees Centigrade, and pressure is at or near atmospheric.

[0209] General methods in molecular biology, cell biology and biochemistry can be found in such standard textbooks as “Molecular Cloning: A Laboratory Manual, 3rd Ed.” (Sambrook et al., Harbor Laboratory Press 2001); “Short Protocols in Molecular Biology, 4th Ed.” (Ausubel et al. eds., John Wiley & Sons 1999); “Protein Methods” (Bollag et al., John Wiley & Sons 1996); “Nonviral Vectors for Gene Therapy” (Wagner et al. eds., Academic Press 1999); “Viral Vectors” (Kaplift & Loewy eds., Academic Press 1995); “Immunology Methods Manual” (I. Lefkovits ed., Academic Press 1997); and “Cell and Tissue Culture: Laboratory Procedures in Biotechnology” (Doyle & Griffiths, John Wiley & Sons 1998), the disclosures of which are incorporated herein by reference. Reagents, cloning vectors, and kits for genetic manipulation referred to in this disclosure are available from commercial vendors such as BioRad, Stratagene, Invitrogen, Sigma-Aldrich, and ClonTech.

[0210] Recombinant molecules were generated that combine agonists for the WNT receptors, FZD and/or LRP co-receptors, together with agonists for the E3 ligase receptors, ZNRF3 or RNF43, to create WNT signaling ‘super agonists’

[0211] Materials and methods employed in the following Examples include the following.

### Protein Production

[0212] All recombinant proteins were produced in Expi293F cells (Thermo Fisher Scientific) by transient transfection. The FvFab proteins were first purified using cOmplete® His-tag purification resin (Sigma-Aldrich). The heterodimeric Fc-based proteins were first purified using MiniChrom MabSelect SuRe (Repligen), then polished by cOmplete® His-tag purification resin and anti-Flag M2 affinity gel (Sigma-Aldrich). Other proteins were first purified using MiniChrom MabSelect SuRe unless otherwise specified. All proteins were further polished with Superdex 200 Increase 10/300 GL (GE Healthcare Life Sciences) size-exclusion chromatography (SEC) using IxHBS buffer (20 mM HEPES pH 7.4, 150 mM NaCl). After that, the proteins were examined by SDS-polyacrylamide electrophoresis and estimated to be >90% purity.

### SuperTop Flash (STF) Assay

[0213] WNT signaling activity was measured using HEK293 cells containing a luciferase gene controlled by a WNT-responsive promoter (Super Top Flash reporter assay, STF) as previously reported ({Chen, 2020 #65}). In brief, cells were seeded at a density of 10,000 per well in 96-well plates 24 hours prior to treatment at the presence of 3 μM IWP2 to inhibit the production of endogenous WNTs. The recombinant proteins were then added to the cells with or without 20 nM Fc-RSPO2 overnight. Recombinant human WNT3A (R&D systems) was used as a positive control. Cells were lysed with Luciferase Cell Culture Lysis Reagent (Promega) and luciferase activity was measured with Luciferase Assay System (Promega) using vendor suggested procedures.

### Cell Flow Cytometry

[0214] HEK293 cells transiently transfected with a plasmid overexpressing ZNRF3 (Gen-Script OHu22977) were treated for 24 h with RSPO derivative molecules at 10 nM final concentration in DMEM supplemented with 10% FBS. Cells were dissociated using Gibco enzyme-free dissociation buffer, washed, and resuspended in FACS buffer (1× PBS with 1% BSA with 0.02% sodium azide). Cells were incubated with 1 nM F12578 IgG for 1 h. After washing, the cells were incubated with goat anti-human IgG Alexa Fluor 647 (Invitrogen, Carlsbad, Calif.) for 40 min. Cells were washed with FACS buffer and subjected to multi-channel analysis using a SONY SH800S flow cytometer (BD Biosciences. Data were processed with FlowJo software (FlowJo, Ashland, Oreg.) and fluorescence signals were displayed in histogram plots.

### Primary Cells and Organoid Expansion

[0215] Mouse small intestinal organoids (#70931 STEMCELL Technologies) were maintained and expanded as described in Sato et al., 2009. In short, adapted expansion medium contained Advanced DMEM, 10 mM HEPES, 1× GlutaMAX, 1× Penicillin-Streptomycin, 1× B27, 1.25 mM N-acetylcysteine, 50 ng/mL recombinant human EGF, 50 ng/mL recombinant human Noggin and 500 ng/mL recombinant human R-Spondin 1 (see Table 1).

[0216] Human small intestinal organoids were a gift from the Calvin Kuo Lab at Stanford. Organoids were maintained and expanded as described in Sato et al., 2011 (Sato et al., 2011). In short, adapted expansion medium contained Advanced DMEM, 10 mM HEPES, 1× GlutaMAX, 1× Penicillin-Streptomycin, 1× B27, 1× N2, 1.25 mM N-acetylcysteine, 10 mM Nicotinamide, 50 ng/mL recombinant human EGF, 50 ng/mL recombinant human Noggin, 500 ng/mL recombinant human R-Spondin 1, 0.5 nM L6-F12578 surrogate Wnt, 10 nM recombinant Gastrin, 500 nM A83-01 and 10 M SB202190 (see Table 1).

[0217] Mouse hepatocyte organoids were grown from primary CD1 murine hepatocytes (#MSCP20 Thermo Fisher) and expanded as described in Hu et al., 2018. In short, adapted expansion medium contained Advanced DMEM, 10 mM HEPES, 1× GlutaMAX, 1× Penicillin-Streptomycin, 1× B27, 1.25 mM N-acetylcysteine, 50 ng/mL recombinant human EGF, 50 ng/mL recombinant human Noggin, 500 ng/mL recombinant human R-Spondin 1, 10 nM recombinant Gastrin, 3 μM CHIR99021, 25 ng/mL recombinant HGF, 50 ng/mL FGF7, 50 ng/mL FGF10, 10 mM Nicotinamide and 500 nM A83-01 (see Table 1).

[0218] Human kidney organoids were established from primary human renal proximal tubule epithelial cells (PCS-400-010) and maintained and expanded as described in Schutgens et al., 2019. In short, adapted expansion medium contained Advanced DMEM, 10 mM HEPES, 1× GlutaMAX, 1× Penicillin-Streptomycin, 1× B27, 50 ng/mL recombinant human EGF, 100 ng/mL recombinant human FGF10, 500 nM A83-01 and 500 ng/mL recombinant human R-Spondin 1 (see Table 1).

### Outgrowth Efficiency Assay

[0219] For the outgrowth efficiency assay all organoid lines (mouse small intestine, human small intestine and human kidney) were digested to small, near single cell suspension, fragments using 1× TrypLE (12605010 GIBCO) for 10 minutes at 37° C. Mouse hepatocyte outgrowth efficiency was performed with primary single cells. For all cell types the base medium consisted of expansion medium without RSPO1, Surrogate Wnt and/or CHIR99021 and supplemented with 1 μM porcupine inhibitor Wnt-C59 (#5148 Tocris) and 10 μM Y-27632 (#5092280001 MilliporeSigma). Experimental conditions, as in FIG. 3, consisted of one or combination of 500 ng/mL RSPO1, 100 ng/mL recombinant human Wnt-3a, 1 nM Surrogate WNT L6-F12578 (0.1 nM for mouse small intestinal organoids) or 1 nM WNT super agonist L6-F12578-RSPO2RA (0.1 nM for mouse small intestinal organoids. All cells for all conditions were plated in 15 L Matrigel droplets in 96-well plates and submerged in 120 L of the experimental medium. Mouse small intestine, human small intestine and human kidney organoids were expanded for 7 days before measurement and mouse hepatocyte organoids for 14 days before measurements. The medium was changed approximately every 3 days. Each experiment consisted of three technical replicates per plate and was repeated three times. Outgrowth efficiency was quantified using cell viability assay CellTiter-Glo (G9683 Promega) measured on the SpectraMax Paradigm microplate reader (Molecular Devices) according to manufactures protocols.

TABLE 1
Organoid Reagents
Organoid reagents

| Component | Catalog number |
|---|---|
| Advanced DMEM | Thermo Scientific 12634-010 |
| HEPES | Thermo Scientific 15630080 |
| GlutaMAX | Thermo Scientific 35050061 |
| Penicillin-Streptomycin | Thermo Scientific 15140122 |
| B27 | Thermo Scientific 17504044 |
| N2 | Thermo Scientific 17502048 |
| Nicotinamide | Sigma-Aldrich N0636 |
| N-acetylcysteine | Sigma-Aldrich A9165 |
| A83-01 | Tocris 2939 |
| CHIR99021 | Tocris 4423 |
| SB202190 | Tocris 126410 |
| Recombinant Human EGF | Peprotech AF-100-15 |
| Recombinant Human FGF7 | Peprotech 100-19 |
| Recombinant Human FGF10 | Peprotech 100-26 |
| Recombinant Human Noggin | Peprotech 120-10C |
| Recombinant Human HGF | Peprotech 100-39H |
| Human Gastrin I | Tocris 30061 |
| Recombinant Human R-Spondin 1 | R&D 4645RS |
| Recombinant Human Wnt-3a | R&D 5036WN |
| Surrogate WNT L6-F12578 | In-house production |
| WNT super agonist L6-F12578-RSPO2RA | In-house production |
| Matrigel ™ GFR Membrane Matrix | Corning CB40230C |

### Murine Studies and Dual Energy X-Ray Absorptiometry (DEXA):

[0220] All animal experiments were performed according to national ethical guidelines in addition to the guidance and approval by the Institutional Animal Care and Use Committee (IACUC) of Surrozen, Inc. Twelve-week-old C57Bl1/6J female mice were obtained from Jackson Laboratories (Bar Harbor, Me., USA) and were housed 4 per cage. Proteins treatments at 3 mg per kg were intraperitoneal dosed on day 0, 3, 7 and 10. Bone mineral density (BMD) and fat content of animals were measured via in vivo DEXA method using a Faxitron UltraFocus (Faxitron Bioptics, Tucson, Ariz.) on day 0, 7 and 13. Animals were anesthetized during imaging through isoflurane and sample ROI included the entire murine skeleton except material above the cervical spine due to increased radiographical intensity of the skull. BMD and fat content were calculated using the accompanying Vision DXA software. Animals were terminated on day 14, and liver, small intestine, and salivary glands were collected for histology.

### Example 1

### WNT Surrogate Formats

[0221] A new modular and flexible platform for potent, selective WNT surrogate generation was created (see, e.g., WO 2020/010308). A key feature of the platform was the requirement for multimerization of FZDs and LRPs, with optimal stoichiometry of two FZD and one or two LRP binders, for maximal WNT/β-catenin activation. This platform was built based on tandem scFv antibody fragment format (See Table 3). To understand whether additional multivalent antibody formats can produce active surrogate WNTs, Fv-IgG, Fab-IgG, scFv-IgG formats as shown in FIG. 1A, FIG. 4A, and Table 3, were tested. These formats also offered different distances and geometries between the different binding arms on the antibody molecule, allowing the assessment of the contribution of format and geometry to activity.

[0222] Certain FZD and LRP binders were selected for each construct. Table 2 provides the nomenclature of components used.

TABLE 2
WNT surrogate format components

| Component designation | Clone name | Specificity |
|---|---|---|
| F12578 | 18R5 | FZD 1, 2, 7, 5, 8 |
| F127 | R2H1 | FZD 1, 2, 7 |
| F58 | 2919 | FZD 5, 8 |
| F4 | 5044 | FZD 4 |
| F4-2 | 5063 | FZD 4 |
| F49 | 3SC10 | FZD 4, 9 |
| F10 | hB9L9.3 | FZD 10 |
| F6 | R2M3 | FZD 1, 2, 7, 5, 8 |
| F7 | 1791 | FZD 7 |
| F7B | F7.B | FZD1, 2, 7, 5, 8, 4 |
| F2I | F2.I | FZD1, 2, 7, 5, 8, 4 |
| L6 | YW211.31.57 | LRP6e3e4 |
| L2 | 26 (009S-E04) | LRP6e3e4 |

[0223] An LRP6E3E4 binder, YW211.31.57 (see, e.g., U.S. Pat. No. 8,846,041; designated “L1”), and a FZD 1,2,7,5,8 binder, 18R5 (Gurney, et al. (2012) Proc. Natl. Acad. Sci. 109:1171-11722; designated “F1”) were chosen to combine in the formats shown in FIG. 1A, FIG. 4A, and Table 3 to generate the following constructs: L6F12578 (scFv-Fc), L6-F12578 (Fv-IgG), and L6-F12578 (Fab-IgG). As a negative control, anti-GFP binders were used. These proteins were purified via a Protein A-affinity column followed by size-exclusion chromatography (SEC) and tested in WNT responsive HEK293 Super TOP-FLASH (STF) reporter cells.

[0224] As shown in FIG. 1B, while all three formats yielded active surrogate WNTs, L6-F12578 (Fv-IgG) gave the highest Emax with EC50 of 0.81 nM, while L6-F12578 (Fab-IgG) gave the lowest Emax with EC50 of 0.39 nM. L6-F12578 (scFv-Fc) was the least potent with Emax similar to Fv-IgG. These surrogate WNTs responded to RSPO treatment, while preserving the relative range in potency and Emax; addition of RSPO increased both Emax and potency of all three surrogates (FIG. 1C).

[0225] Since the Fv-IgG format produced the most active molecule, is easier to manufacture, and has more desirable biophysical properties, for example, being a much more stable format compared to tandem scFvs, which are less stable and have propensity for aggregation, we focused on Fv-IgG for additional WNT mimetic generation. To test the general applicability of this format, we chose additional FZD binders of different specificity for mimetic assembly with LRP binder, L6. These additional FZD binders, R2H1 (US 2016/0194394, FZD1,2,7 binder referred herein as F127), 2919 (WO 2017/127933, FZD5,8 binder referred herein as F58), 5044 (US 2016/0194394, FZD₄ binder referred herein as F4), 5063 (US 2016/0194394, FZD4 binder referred herein as F4-2), 3SC10 (WO 2019/126399, FZD_{4,9} binder referred herein as F49), hB9L9.3 (US 2016/0194394, FZD₁₀ binder referred herein as F10), F7.B (Pavlovic, et al. (2018) mAbs 10(8): 1157-1167, FZD_{1,2,4,5,7,8} binder referred herein as F7B), and F2.I (Pavlovic, et al. (2018) mAbs 10(8): 1157-1167, FZD_{1,2,4,5,7,8} binder referred herein as F2I) covers the 8 FZDs that signals through β-catenin. The new WNT mimetics, L6-F127 (Fv-IgG), L6-F58 (Fv-IgG), L6-F7B (Fv-IgG), and L6-F2I (Fv-IgG) which binds FZD_{1,2,7}, FZD_{5,8}, FZD_{1,2,4,5,7,8}, and FZD_{1,2,4,5,7,8}, respectively, are highly active on the WNT responsive HEK293 STF cells (FIG. 1D, 1L). Since HEK293 cells does not express or expresses low levels of FZD₄, FZD₉, and FZD₁₀ (data not shown), the parental cells do not show significant response to L6-F4 (Fv-IgG), L6-F49 (Fv-IgG), and L6-F10 (Fv-IgG) (FIG. 1G, 1I, 1K). However, L6-F4 (Fv-IgG), L6-F49 (Fv-IgG), L6-F10 (Fv-IgG), and L6-F4-2 (Fv-IgG) induced potent signaling in HEK293 STF cells over-expressing FZD₄, FZD₉, FZD₁₀, and FZD₄, respectively, consistent with their binding specificity toward these three receptors (FIG. 1F, 1H, 1J, 1M). These WNT mimetics are a valuable set of molecules that allows studies of β-catenin dependent FZDs.

[0226] We have shown previously that in tandem scFv format, multivalent binding to FZDs and LRPs are important for signaling, and bispecific tandem scFv molecules with one FZD and one LRP binding arms are either weak or inactive in inducing Wnt signaling (Chen et al., 2020). To assess the valency requirement in the Fv-IgG format, we generated this set of FZD/LRP binders in the bispecific Fv-Fab format where there is one each of FZD and LRP binding arms (FIG. 1A). As shown in FIG. 1E-1K, none of these bispecific with monovalent binding to FZD and LRP induced significant activation of Wnt signaling, further confirming that the previously observed valency requirement in the tandem scFv, VHH-IgG formats also applies to other antibody formats. As the Fv-IgG molecules are studied further in the subsequent sections, the Fv-IgG designation will be removed from molecule names for brevity.

TABLE 3
Formats and sequences of WNT surrogate molecules; Italic underline = linker; Bold =
VH or VL. Formats are diagrammed in FIG. 7

| | | Polypeptide Sequence(s) Present in Structure |
|---|---|---|
| | | (as depicted in the accompanying figures, WNT surrogate molecules |
| Structure | Structure | typically comprises two of each polypeptide sequence shown for any |
| Type | Name | particular structure) |
| Tandem | L6-F12578 | SEQ ID NO: 18 |
| scFv | (scFv-FC) | EVQLVESGGGLVQPGGSLRLSCAASGFTFTSYYISWVRQAPGKGLEW |
| | | VAEISPYSGSTYYADSVKGRFTISADTSKNTAYLQMNSLRAEDTAVYY |
| | | CALRARPPIRLHPRGSVMDYWGQGTLVTVSSGSAASGSSGGSSSGADIQ |
| | | MTQSPSSLSASVGDRVTITCRASQDVSTAVAWYQQKPGKAPKLLIYSA |
| | | SFLYSGVPSRFSGSGSGTDFTLTISSLQPEDFATYYCQQSYTTPPTFGQ |
| | | GTKVEIKGSGSGGSGSGGSSGGEVQLVESGGGLVQPGGSLRLSCAASGF |
| | | TFSHYTLSWVRQAPGKGLEWVSVISGDGSYTYYADSVKGRFTISSDNS |
| | | KNTLYLQMNSLRAEDTAVYYCARNFIKYVFANWGQGTLVTVSSGGG |
| | | GSGGGGSGGGGSDIELTQPPSVSVAPGQTARISCSGDNIGSFYVHWYQQ |
| | | KPGQAPVLVIYDKSNRPSGIPERFSGSNSGNTATLTISGTQAEDEADYY |
| | | CQSYANTLSLVFGGGTKLTVLGSGSGDKTHTCPPCPAPEAAGGPSVFLFP |
| | | PKPKDTLMISRTPEVTCVVVDVSHEDPEVKFNWYVDGVEVHNAKTKPRE |
| | | EQYNSTYRVVSVLTVLHQDWLNGKEYKCKVSNKALGAPIEKTISKAKGQ |
| | | PREPQVYTLPPSREEMTKNQVSLTCLVKGFYPSDIAVEWESNGQPENNYK |
| | | TTPPVLDSDGSFFLYSKLTVDKSRWQQGNVFSCSVMHEALHNHYTQKSL |
| | | SLSPGK |
| Fv-IgG | L6-F12578 | Heavy Chain SEQ ID NO: 19 |
| | (Fv-IgG) | EVQLVESGGGLVQPGGSLRLSCAASGFTFTSYYISWVRQAPGKGLEW |
| | | VAEISPYSGSTYYADSVKGRFTISADTSKNTAYLQMNSLRAEDTAVYY |
| | | CALRARPPIRLHPRGSVMDYWGQGTLVTVSSGGGGSGGGGSGGGGSE |
| | | VQLVESGGGLVQPGGSLRLSCAASGFTFSHYTLSWVRQAPGKGLEW |
| | | VSVISGDGSYTYYADSVKGRFTISSDNSKNTLYLQMNSLRAEDTAVYY |
| | | CARNFIKYVFANWGQGTLVTVSSASTKGPSVFPLAPSSKSTSGGTAALG |
| | | CLVKDYFPEPVTVSWNSGALTSGVHTFPAVLQSSGLYSLSSVVTVPSSSLG |
| | | TQTYICNVNHKPSNTKVDKKVEPKSCDKTHTCPPCPAPEAAGGPSVFLFPP |
| | | KPKDTLMISRTPEVTCVVVDVSHEDPEVKFNWYVDGVEVHNAKTKPREE |
| | | QYNSTYRVVSVLTVLHQDWLNGKEYKCKVSNKALGAPIEKTISKAKGQP |
| | | REPQVYTLPPSREEMTKNQVSLTCLVKGFYPSDIAVEWESNGQPENNYKT |
| | | TPPVLDSDGSFFLYSKLTVDKSRWQQGNVFSCSVMHEALHNHYTQKSLS |
| | | LSPGK |
| | | Light Chain SEQ ID NO: 20 |
| | | DIQMTQSPSSLSASVGDRVTITCRASQDVSTAVAWYQQKPGKAPKLLI |
| | | YSASFLYSGVPSRFSGSGSGTDFTLTISSLQPEDFATYYCQQSYTTPPTF |
| | | GQGTKVEIKGGGGSGGGGSGGGGSDIELTQPPSVSVAPGQTARISCSGD |
| | | NIGSFYVHWYQQKPGQAPVLVIYDKSNRPSGIPERFSGSNSGNTATLTI |
| | | SGTQAEDEADYYCQSYANTLSLVFGGGTKLTVLGQPKAAPSVTLFPPSS |
| | | EELQANKATLVCLISDFYPGAVTVAWKADSSPVKAGVETTTPSKQSNNK |
| | | YAASSYLSLTPEQWKSHRSYSCQVTHEGSTVEKTVAPTECS |
| Fab(IgG) | L6-F12578 | L6 Light Chain-F12578 Heavy Chain SEQ ID NO: 21 |
| | (Fab-IgG) | DIQMTQSPSSLSASVGDRVTITCRASQDVSTAVAWYQQKPGKAPKLLI |
| | | YSASFLYSGVPSRFSGSGSGTDFTLTISSLQPEDFATYYCQQSYTTPPTF |
| | | GQGTKVEIKRTVAAPSVFIFPPSDEQLKSGTASVVCLLNNFYPREAKVQW |
| | | KVDNALQSGNSQESVTEQDSKDSTYSLSSTLTLSKADYEKHKVYACEVT |
| | | HQGLSSPVTKSFNRGECGGGGSGGGGSGGGGSEVQLVESGGGLVQPGG |
| | | SLRLSCAASGFTFSHYTLSWVRQAPGKGLEWVSVISGDGSYTYYADSV |
| | | KGRFTISSDNSKNTLYLQMNSLRAEDTAVYYCARNFIKYVFANWGQG |
| | | TLVTVSSASTKGPSVFPLAPSSKSTSGGTAALGCLVKDYFPEPVTVSWNS |
| | | GALTSGVHTFPAVLQSSGLYSLSSVVTVPSSSLGTQTYICNVNHKPSNTKV |
| | | DKKVEPKSCDKTHTCPPCPAPEAAGGPSVFLFPPKPKDTLMISRTPEVTCV |
| | | VVDVSHEDPEVKFNWYVDGVEVHNAKTKPREEQYNSTYRVVSVLTVLH |
| | | QDWLNGKEYKCKVSNKALGAPIEKTISKAKGQPREPQVYTLPPSREEMTK |
| | | NQVSLTCLVKGFYPSDIAVEWESNGQPENNYKTTPPVLDSDGSFFLYSKL |
| | | TVDKSRWQQGNVFSCSVMHEALHNHYTQKSLSLSPGK |
| | | F12578 Light Chain SEQ ID NO: 22 |
| | | DIELTQPPSVSVAPGQTARISCSGDNIGSFYVHWYQQKPGQAPVLVIY |
| | | DKSNRPSGIPERFSGSNSGNTATLTISGTQAEDEADYYCQSYANTLSLV |
| | | FGGGTKLTVLGQPKAAPSVTLFPPSSEELQANKATLVCLISDFYPGAVTV |
| | | AWKADSSPVKAGVETTTPSKQSNNKYAASSYLSLTPEQWKSHRSYSCQV |
| | | THEGSTVEKTVAPTECS |
| | | L6Variable Heavy Chain - Constant Heavy Chain 1 SEQ ID NO: 23 |
| | | EVQLVESGGGLVQPGGSLRLSCAASGFTFTSYYISWVRQAPGKGLEW |
| | | VAEISPYSGSTYYADSVKGRFTISADTSKNTAYLQMNSLRAEDTAVYY |
| | | CALRARPPIRLHPRGSVMDYWGQGTLVTVSSASTKGPSVFPLAPSSKST |
| | | SGGTAALGCLVKDYFPEPVTVSWNSGALTSGVHTFPAVLQSSGLYSLSSV |
| | | VTVPSSSLGTQTYICNVNHKPSNTKVDKKVEPKSC |
| Fv-IgG | L6-F127 | Heavy Chain SEQ ID NO: 24 |
| | | EVQLVESGGGLVQPGGSLRLSCAASGFTFTSYYISWVRQAPGKGLEWV |
| | | AEISPYSGSTYYADSVKGRFTISADTSKNTAYLQMNSLRAEDTAVYYCA |
| | | LRARPPIRLHPRGSVMDYWGQGTLVTVSSGGGGSGGGGSGGGGSEVQL |
| | | VESGGGLVQPGGSLRLSCAASGFNISSSYIHWVRQAPGKGLEWVAYIY |
| | | SSYGSTYYADSVKGRFTISADTSKNTAYLQMNSLRAEDTAVYYCARAS |
| | | WYALDYWGQGTLVTVSSASTKGPSVFPLAPSSKSTSGGTAALGCLVKDY |
| | | FPEPVTVSWNSGALTSGVHTFPAVLQSSGLYSLSSVVTVPSSSLGTQTYICN |
| | | VNHKPSNTKVDKKVEPKSCDKTHTCPPCPAPEAAGGPSVFLFPPKPKDTLM |
| | | ISRTPEVTCVVVDVSHEDPEVKFNWYVDGVEVHNAKTKPREEQYNSTYRV |
| | | VSVLTVLHQDWLNGKEYKCKVSNKALGAPIEKTISKAKGQPREPQVYTLP |
| | | PSREEMTKNQVSLTCLVKGFYPSDIAVEWESNGQPENNYKTTPPVLDSDGS |
| | | FFLYSKLTVDKSRWQQGNVFSCSVMHEALHNHYTQKSLSLSPGK |
| | | Light Chain SEQ ID NO: 25 |
| | | DIQMTQSPSSLSASVGDRVTITCRASQDVSTAVAWYQQKPGKAPKLLIY |
| | | SASFLYSGVPSRFSGSGSGTDFTLTISSLQPEDFATYYCQQSYTTPPTFG |
| | | QGTKVEIKGGGGSGGGGSGGGGSDIQMTQSPSSLSASVGDRVTITCRAS |
| | | QSVSSAVAWYQQKPGKAPKLLIYSASSLYSGVPSRFSGSRSGTDFTLTIS |
| | | SLQPEDFATYYCQQYWYGVAPITFGQGTKVEIKRTVAAPSVFIFPPSDEQ |
| | | LKSGTASVVCLLNNFYPREAKVQWKVDNALQSGNSQESVTEQDSKDSTYS |
| | | LSSTLTLSKADYEKHKVYACEVTHQGLSSPVTKSFNRGEC |
| Fv-IgG | L6-F58 | Heavy Chain SEQ ID NO: 26 |
| | | EVQLVESGGGLVQPGGSLRLSCAASGFTFTSYYISWVRQAPGKGLEWV |
| | | AEISPYSGSTYYADSVKGRFTISADTSKNTAYLQMNSLRAEDTAVYYCA |
| | | LRARPPIRLHPRGSVMDYWGQGTLVTVSSGGGGSGGGGSGGGGSEVQL |
| | | VESGGGLVQPGGSLRLSCAASGFNISYSYIHWVRQAPGKGLEWVASIY |
| | | SSSGSTSYADSVKGRFTISADTSKNTAYLQMNSLRAEDTAVYYCARGAI |
| | | DYWGQGTLVTVSSASTKGPSVFPLAPSSKSTSGGTAALGCLVKDYFPEPV |
| | | TVSWNSGALTSGVHTFPAVLQSSGLYSLSSVVTVPSSSLGTQTYICNVNHK |
| | | PSNTKVDKKVEPKSCDKTHTCPPCPAPEAAGGPSVFLFPPKPKDTLMISRTP |
| | | EVTCVVVDVSHEDPEVKFNWYVDGVEVHNAKTKPREEQYNSTYRVVSVL |
| | | TVLHQDWLNGKEYKCKVSNKALGAPIEKTISKAKGQPREPQVYTLPPSREE |
| | | MTKNQVSLTCLVKGFYPSDIAVEWESNGQPENNYKTTPPVLDSDGSFFLYS |
| | | KLTVDKSRWQQGNVFSCSVMHEALHNHYTQKSLSLSPGK |
| | | Light Chain SEQ ID NO: 27 |
| | | DIQMTQSPSSLSASVGDRVTITCRASQDVSTAVAWYQQKPGKAPKLLIY |
| | | SASFLYSGVPSRFSGSGSGTDFTLTISSLQPEDFATYYCQQSYTTPPTFG |
| | | QGTKVEIKGGGGSGGGGSGGGGSDIQMTQSPSSLSASVGDRVTITCRAS |
| | | QSVSSAVAWYQQKPGKAPKLLIYSASSLYSGVPSRFSGSRSGTDFTLTIS |
| | | SLQPEDFATYYCQQWYSSGHVLITFGQGTKVEIKRTVAAPSVFIFPPSDE |
| | | QLKSGTASVVCLLNNFYPREAKVQWKVDNALQSGNSQESVTEQDSKDST |
| | | YSLSSTLTLSKADYEKHKVYACEVTHQGLSSPVTKSFNRGEC |
| Fv-IgG | L6-F4-2 | Heavy Chain SEQ ID NO: 28 |
| | | EVQLVESGGGLVQPGGSLRLSCAASGFTFTSYYISWVRQAPGKGLEW |
| | | VAEISPYSGSTYYADSVKGRFTISADTSKNTAYLQMNSLRAEDTAVYY |
| | | CALRARPPIRLHPRGSVMDYWGQGTLVTVSSGGGGSGGGGSGGGGSE |
| | | VQLVESGGGLVQPGGSLRLSCAASGFNISYYYIHWVRQAPGKGLEWV |
| | | ASIYPSSGYTYYADSVKGRFTISADTSKNTAYLQMNSLRAEDTAVYYC |
| | | ARSSFYWAMDYWGQGTLVTVSSASTKGPSVFPLAPSSKSTSGGTAALG |
| | | CLVKDYFPEPVTVSWNSGALTSGVHTFPAVLQSSGLYSLSSVVTVPSSSLG |
| | | TQTYICNVNHKPSNTKVDKKVEPKSCDKTHTCPPCPAPEAAGGPSVFLFPP |
| | | KPKDTLMISRTPEVTCVVVDVSHEDPEVKFNWYVDGVEVHNAKTKPREE |
| | | QYNSTYRVVSVLTVLHQDWLNGKEYKCKVSNKALGAPIEKTISKAKGQP |
| | | REPQVYTLPPSREEMTKNQVSLTCLVKGFYPSDIAVEWESNGQPENNYKT |
| | | TPPVLDSDGSFFLYSKLTVDKSRWQQGNVFSCSVMHEALHNHYTQKSLS |
| | | LSPGK |
| | | Light Chain SEQ ID NO: 29 |
| | | DIQMTQSPSSLSASVGDRVTITCRASQDVSTAVAWYQQKPGKAPKLLI |
| | | YSASFLYSGVPSRFSGSGSGTDFTLTISSLQPEDFATYYCQQSYTTPPTF |
| | | GQGTKVEIKGGGGSGGGGSGGGGSDIQMTQSPSSLSASVGDRVTITCR |
| | | ASQSVSSAVAWYQQKPGKAPKLLIYSASSLYSGVPSRFSGSRSGTDFTL |
| | | TISSLQPEDFATYYCQQSYAAYLFTFGQGTKVEIKRTVAAPSVFIFPPSD |
| | | EQLKSGTASVVCLLNNFYPREAKVQWKVDNALQSGNSQESVTEQDSKDS |
| | | TYSLSSTLTLSKADYEKHKVYACEVTHQGLSSPVTKSFNRGEC |
| Fv-IgG | L6-F10 | Heavy Chain SEQ ID NO: 30 |
| | | EVQLVESGGGLVQPGGSLRLSCAASGFTFTSYYISWVRQAPGKGLEW |
| | | VAEISPYSGSTYYADSVKGRFTISADTSKNTAYLQMNSLRAEDTAVYY |
| | | CALRARPPIRLHPRGSVMDYWGQGTLVTVSSGGGGSGGGGSGGGGSE |
| | | VQLVESGGGLVQPGGSLRLSCAASGFTFSSFNMFWVRQAPGKGLEW |
| | | VAGIDDDGSYPNYGSAVKGRATISRDNSKNTLYLQMNSLRAEDTAVY |
| | | YCAKSGYGGSWGGYIADDIDAWGQGTLVTVSSASTKGPSVFPLAPSSK |
| | | STSGGTAALGCLVKDYFPEPVTVSWNSGALTSGVHTFPAVLQSSGLYSLS |
| | | SVVTVPSSSLGTQTYICNVNHKPSNTKVDKKVEPKSCDKTHTCPPCPAPEA |
| | | AGGPSVFLFPPKPKDTLMISRTPEVTCVVVDVSHEDPEVKFNWYVDGVEV |
| | | HNAKTKPREEQYNSTYRVVSVLTVLHQDWLNGKEYKCKVSNKALGAPIE |
| | | KTISKAKGQPREPQVYTLPPSREEMTKNQVSLTCLVKGFYPSDIAVEWES |
| | | NGQPENNYKTTPPVLDSDGSFFLYSKLTVDKSRWQQGNVFSCSVMHEAL |
| | | HNHYTQKSLSLSPGK |
| | | Light Chain SEQ ID NO: 31 |
| | | DIQMTQSPSSLSASVGDRVTITCRASQDVSTAVAWYQQKPGKAPKLLI |
| | | YSASFLYSGVPSRFSGSGSGTDFTLTISSLQPEDFATYYCQQSYTTPPTF |
| | | GQGTKVEIKGGGGSGGGGSGGGGSELTQPPSVSVSPGQTARITCSGDGS |
| | | YAGSYYYGWYQQKPGQAPVTLIYYNNKRPSGIPERFSGSLSGSTNTLT |
| | | ISGVQAEDEADYYCGSADNSGAAFGGGTKLTVLRTVAAPSVFIFPPSDE |
| | | QLKSGTASVVCLLNNFYPREAKVQWKVDNALQSGNSQESVTEQDSKDST |
| | | YSLSSTLTLSKADYEKHKVYACEVTHQGLSSPVTKSFNRGEC |
| Fv-IgG | L6-F4 | Heavy Chain SEQ ID NO: 55 |
| | | EVQLVESGGGLVQPGGSLRLSCAASGFTFTSYYISWVRQAPGKGLEW |
| | | VAEISPYSGSTYYADSVKGRFTISADTSKNTAYLQMNSLRAEDTAVYY |
| | | CALRARPPIRLHPRGSVMDYWGQGTLVTVSSGGGGSGGGGSGGGGSE |
| | | VQLVESGGGLVQPGGSLRLSCAASGFNLSSYSMHWVRQAPGKGLEW |
| | | VAYISSYYGYTYYADSVKGRFTISADTSKNTAYLQMNSLRAEDTAVYY |
| | | CARPAPGHWGFDYWGQGTLVTVSSASTKGPSVFPLAPSSKSTSGGTAA |
| | | LGCLVKDYFPEPVTVSWNSGALTSGVHTFPAVLQSSGLYSLSSVVTVPSSS |
| | | LGTQTYICNVNHKPSNTKVDKKVEPKSCDKTHTCPPCPAPEAAGGPSVFL |
| | | FPPKPKDTLMISRTPEVTCVVVDVSHEDPEVKFNWYVDGVEVHNAKTKP |
| | | REEQYNSTYRVVSVLTVLHQDWLNGKEYKCKVSNKALGAPIEKTISKAK |
| | | GQPREPQVYTLPPSREEMTKNQVSLTCLVKGFYPSDIAVEWESNGQPENN |
| | | YKTTPPVLDSDGSFFLYSKLTVDKSRWQQGNVFSCSVMHEALHNHYTQK |
| | | SLSLSPGK |
| | | Light Chain SEQ ID NO: 56 |
| | | DIQMTQSPSSLSASVGDRVTITCRASQDVSTAVAWYQQKPGKAPKLLI |
| | | YSASFLYSGVPSRFSGSGSGTDFTLTISSLQPEDFATYYCQQSYTTPPTF |
| | | GQGTKVEIKGGGGSGGGGSGGGGSDIQMTQSPSSLSASVGDRVTITCR |
| | | ASQSVSSAVAWYQQKPGKAPKLLIYSASSLYSGVPSRFSGSRSGTDFTL |
| | | TISSLQPEDFATYYCQQWYYAPITFGQGTKVEIKRTVAAPSVFIFPPSDE |
| | | QLKSGTASVVCLLNNFYPREAKVQWKVDNALQSGNSQESVTEQDSKDST |
| | | YSLSSTLTLSKADYEKHKVYACEVTHQGLSSPVTKSFNRGEC |
| Fv-IgG | L6-F49 | Heavy Chain SEQ ID NO: 57 |
| | | EVQLVESGGGLVQPGGSLRLSCAASGFTFTSYYISWVRQAPGKGLEW |
| | | VAEISPYSGSTYYADSVKGRFTISADTSKNTAYLQMNSLRAEDTAVYY |
| | | CALRARPPIRLHPRGSVMDYWGQGTLVTVSSGGGGSGGGGSGGGGSE |
| | | VQLVQSGAEVKKPGASVKVSCKASGGTFSSYAISWVRQAPGQGLEW |
| | | MGWINAGNGNTTYAQKFQGRVTMTRDTSTSTVYMELSSLRSEDTAV |
| | | YYCARHYYGSGSYPDWGQGTLVTVSSASTKGPSVFPLAPSSKSTSGGTA |
| | | ALGCLVKDYFPEPVTVSWNSGALTSGVHTFPAVLQSSGLYSLSSVVTVPS |
| | | SSLGTQTYICNVNHKPSNTKVDKKVEPKSCDKTHTCPPCPAPEAAGGPSV |
| | | FLFPPKPKDTLMISRTPEVTCVVVDVSHEDPEVKFNWYVDGVEVHNAKT |
| | | KPREEQYNSTYRVVSVLTVLHQDWLNGKEYKCKVSNKALGAPIEKTISK |
| | | AKGQPREPQVYTLPPSREEMTKNQVSLTCLVKGFYPSDIAVEWESNGQPE |
| | | NNYKTTPPVLDSDGSFFLYSKLTVDKSRWQQGNVFSCSVMHEALHNHYT |
| | | QKSLSLSPGK |
| | | Light Chain SEQ ID NO: 58 |
| | | DIQMTQSPSSLSASVGDRVTITCRASQDVSTAVAWYQQKPGKAPKLLI |
| | | YSASFLYSGVPSRFSGSGSGTDFTLTISSLQPEDFATYYCQQSYTTPPTF |
| | | GQGTKVEIKRGGGGSGGGGSGGGGSDIQMTQSPSSPSASVGDRVTITCR |
| | | ASQSISSYLNWYQQKPGKAPKLLIYAASSLQSGVPSRFSGSGSGTDFTL |
| | | TISSLQPEDFATYYCQQSYSTPLTFGGGTKVEIKRTVAAPSVFIFPPSDE |
| | | QLKSGTASVVCLLNNFYPREAKVQWKVDNALQSGNSQESVTEQDSKDST |
| | | YSLSSTLTLSKADYEKHKVYACEVTHQGLSSPVTKSFNRGEC |
| Fv-IgG | L6-F7B | Heavy Chain SEQ ID NO: 59 |
| | | EVQLVESGGGLVQPGGSLRLSCAASGFTFTSYYISWVRQAPGKGLEW |
| | | VAEISPYSGSTYYADSVKGRFTISADTSKNTAYLQMNSLRAEDTAVYY |
| | | CALRARPPIRLHPRGSVMDYWGQGTLVTVSSGGGGSGGGGSGGGGSE |
| | | VQLVESGGGLVQPGGSLRLSCAASGFNFSSSSIHWVRQAPGKGLEWV |
| | | AYIYPSYDYTYYADSVKGRFTISADTSKNTAYLQMNSLRAEDTAVYYC |
| | | ARGYFYTWGGMDYWGQGTLVTVSSASTKGPSVFPLAPSSKSTSGGTAA |
| | | LGCLVKDYFPEPVTVSWNSGALTSGVHTFPAVLQSSGLYSLSSVVTVPSSS |
| | | LGTQTYICNVNHKPSNTKVDKKVEPKSCDKTHTCPPCPAPEAAGGPSVFL |
| | | FPPKPKDTLMISRTPEVTCVVVDVSHEDPEVKFNWYVDGVEVHNAKTKP |
| | | REEQYNSTYRVVSVLTVLHQDWLNGKEYKCKVSNKALGAPIEKTISKAK |
| | | GQPREPQVYTLPPSREEMTKNQVSLTCLVKGFYPSDIAVEWESNGQPENN |
| | | YKTTPPVLDSDGSFFLYSKLTVDKSRWQQGNVFSCSVMHEALHNHYTQK |
| | | SLSLSPGK |
| | | Light Chain SEQ ID NO: 60 |
| | | DIQMTQSPSSLSASVGDRVTITCRASQDVSTAVAWYQQKPGKAPKLLI |
| | | YSASFLYSGVPSRFSGSGSGTDFTLTISSLQPEDFATYYCQQSYTTPPTF |
| | | GQGTKVEIKRGGGGSGGGGSGGGGSDIQMTQSPSSLSASVGDRVTITC |
| | | RASQSVSSAVAWYQQKPGKAPKLLIYSASSLYSGVPSRFSGSRSGTDFT |
| | | LTISSLQPEDFATYYCQQYYSLFTFGQGTKVEIKRTVAAPSVFIFPPSDE |
| | | QLKSGTASVVCLLNNFYPREAKVQWKVDNALQSGNSQESVTEQDSKDST |
| | | YSLSSTLTLSKADYEKHKVYACEVTHQGLSSPVTKSFNRGEC |
| Fv-IgG | L6-F2I | Heavy Chain SEQ ID NO: 61 |
| | | EVQLVESGGGLVQPGGSLRLSCAASGFTFTSYYISWVRQAPGKGLEW |
| | | VAEISPYSGSTYYADSVKGRFTISADTSKNTAYLQMNSLRAEDTAVYY |
| | | CALRARPPIRLHPRGSVMDYWGQGTLVTVSSGGGGSGGGGSGGGGSE |
| | | VQLVESGGGLVQPGGSLRLSCAASGFNIHSSSIHWVRQAPGKGLEWV |
| | | AATYSSFGSITYADSVKGRFTISADTSKNTAYLQMNSLRAEDTAVYYC |
| | | ARYHHPFGYALDYWGQGTLVTVSSASTKGPSVFPLAPSSKSTSGGTAAL |
| | | GCLVKDYFPEPVTVSWNSGALTSGVHTFPAVLQSSGLYSLSSVVTVPSSSL |
| | | GTQTYICNVNHKPSNTKVDKKVEPKSCDKTHTCPPCPAPEAAGGPSVFLF |
| | | PPKPKDTLMISRTPEVTCVVVDVSHEDPEVKFNWYVDGVEVHNAKTKPR |
| | | EEQYNSTYRVVSVLTVLHQDWLNGKEYKCKVSNKALGAPIEKTISKAKG |
| | | QPREPQVYTLPPSREEMTKNQVSLTCLVKGFYPSDIAVEWESNGQPENNY |
| | | KTTPPVLDSDGSFFLYSKLTVDKSRWQQGNVFSCSVMHEALHNHYTQKS |
| | | LSLSPGK |
| | | Light Chain SEQ ID NO: 62 |
| | | DIQMTQSPSSLSASVGDRVTITCRASQDVSTAVAWYQQKPGKAPKLLI |
| | | YSASFLYSGVPSRFSGSGSGTDFTLTISSLQPEDFATYYCQQSYTTPPTF |
| | | GQGTKVEIKRGGGGSGGGGSGGGGSDIQMTQSPSSLSASVGDRVTITC |
| | | RASQSVSSAVAWYQQKPGKAPKLLIYSASSLYSGVPSRFSGSRSGTDFT |
| | | LTISSLQPEDFATYYCQQGVYLFTFGQGTKVEIKRTVAAPSVFIFPPSDE |
| | | QLKSGTASVVCLLNNFYPREAKVQWKVDNALQSGNSQESVTEQDSKDST |
| | | YSLSSTLTLSKADYEKHKVYACEVTHQGLSSPVTKSFNRGEC |
| N-HC- | L6-N-HC | L6-N-HC appended ScFv-F12578-IgG HC SEQ ID NO: 63 |
| appended | appended | EVQLVESGGGLVQPGGSLRLSCAASGFTFTSYYISWVRQAPGKGLEW |
| ScFv-IgG | ScFv- | VAEISPYSGSTYYADSVKGRFTISADTSKNTAYLQMNSLRAEDTAVYY |
| | F12578-IgG | CALRARPPIRLHPRGSVMDYWGQGTLVTVSSGSAASGSSGGSSSGADIQ |
| | | MTQSPSSLSASVGDRVTITCRASQDVSTAVAWYQQKPGKAPKLLIYSA |
| | | SFLYSGVPSRFSGSGSGTDFTLTISSLQPEDFATYYCQQSYTTPPTFGQ |
| | | GTKVEIKGGGGSGGGGSGGGGSEVQLVESGGGLVQPGGSLRLSCAASG |
| | | FTFSHYTLSWVRQAPGKGLEWVSVISGDGSYTYYADSVKGRFTISSDN |
| | | SKNTLYLQMNSLRAEDTAVYYCARNFIKYVFANWGQGTLVTVSSAST |
| | | KGPSVFPLAPSSKSTSGGTAALGCLVKDYFPEPVTVSWNSGALTSGVHTFP |
| | | AVLQSSGLYSLSSVVTVPSSSLGTQTYICNVNHKPSNTKVDKKVEPKSCD |
| | | KTHTCPPCPAPEAAGGPSVFLFPPKPKDTLMISRTPEVTCVVVDVSHEDPE |
| | | VKFNWYVDGVEVHNAKTKPREEQYNSTYRVVSVLTVLHQDWLNGKEY |
| | | KCKVSNKALGAPIEKTISKAKGQPREPQVYTLPPSREEMTKNQVSLTCLV |
| | | KGFYPSDIAVEWESNGQPENNYKTTPPVLDSDGSFFLYSKLTVDKSRWQQ |
| | | GNVFSCSVMHEALHNHYTQKSLSLSPGK |
| | | >F12578 LC SEQ ID NO: 64 |
| | | DIELTQPPSVSVAPGQTARISCSGDNIGSFYVHWYQQKPGQAPVLVIY |
| | | DKSNRPSGIPERFSGSNSGNTATLTISGTQAEDEADYYCQSYANTLSLV |
| | | FGGGTKLTVLGQPKAAPSVTLFPPSSEELQANKATLVCLISDFYPGAVTV |
| | | AWKADSSPVKAGVETTTPSKQSNNKYAASSYLSLTPEQWKSHRSYSCQV |
| | | THEGSTVEKTVAPTECS |
| N-HC- | L6-N-HC | L6-N-HC appended ScFv-F127-IgG HC SEQ ID NO: 65 |
| appended | appended | EVQLVESGGGLVQPGGSLRLSCAASGFTFTSYYISWVRQAPGKGLEW |
| ScFv-IgG | ScFv-F127- | VAEISPYSGSTYYADSVKGRFTISADTSKNTAYLQMNSLRAEDTAVYY |
| | IgG | CALRARPPIRLHPRGSVMDYWGQGTLVTVSSGSAASGSSGGSSSGADIQ |
| | | MTQSPSSLSASVGDRVTITCRASQDVSTAVAWYQQKPGKAPKLLIYSA |
| | | SFLYSGVPSRFSGSGSGTDFTLTISSLQPEDFATYYCQQSYTTPPTFGQ |
| | | GTKVEIKGGGGSGGGGSGGGGSEVQLVESGGGLVQPGGSLRLSCAASG |
| | | FNISSSYIHWVRQAPGKGLEWVAYIYSSYGSTYYADSVKGRFTISADTS |
| | | KNTAYLQMNSLRAEDTAVYYCARASWYALDYWGQGTLVTVSSASTK |
| | | GPSVFPLAPSSKSTSGGTAALGCLVKDYFPEPVTVSWNSGALTSGVHTFPA |
| | | VLQSSGLYSLSSVVTVPSSSLGTQTYICNVNHKPSNTKVDKKVEPKSCDKT |
| | | HTCPPCPAPEAAGGPSVFLFPPKPKDTLMISRTPEVTCVVVDVSHEDPEVK |
| | | FNWYVDGVEVHNAKTKPREEQYNSTYRVVSVLTVLHQDWLNGKEYKC |
| | | KVSNKALGAPIEKTISKAKGQPREPQVYTLPPSREEMTKNQVSLTCLVKGF |
| | | YPSDIAVEWESNGQPENNYKTTPPVLDSDGSFFLYSKLTVDKSRWQQGN |
| | | VFSCSVMHEALHNHYTQKSLSLSPGK |
| | | >F127 LC SEQ ID NO: 66 |
| | | DIQMTQSPSSLSASVGDRVTITCRASQSVSSAVAWYQQKPGKAPKLLI |
| | | YSASSLYSGVPSRFSGSRSGTDFTLTISSLQPEDFATYYCQQYWYGVAP |
| | | ITFGQGTKVEIKRTVAAPSVFIFPPSDEQLKSGTASVVCLLNNFYPREAKV |
| | | QWKVDNALQSGNSQESVTEQDSKDSTYSLSSTLTLSKADYEKHKVYACE |
| | | VTHQGLSSPVTKSFNRGEC |
| N-HC- | L6-N-HC | L6-N-HC appended ScFv-F58-IgG HC SEQ ID NO: 67 |
| appended | appended | EVQLVESGGGLVQPGGSLRLSCAASGFTFTSYYISWVRQAPGKGLEW |
| ScFv-IgG | ScFv-F58- | VAEISPYSGSTYYADSVKGRFTISADTSKNTAYLQMNSLRAEDTAVYY |
| | IgG | CALRARPPIRLHPRGSVMDYWGQGTLVTVSSGSAASGSSGGSSSGADIQ |
| | | MTQSPSSLSASVGDRVTITCRASQDVSTAVAWYQQKPGKAPKLLIYSA |
| | | SFLYSGVPSRFSGSGSGTDFTLTISSLQPEDFATYYCQQSYTTPPTFGQ |
| | | GTKVEIKGGGGSGGGGSGGGGSEVQLVESGGGLVQPGGSLRLSCAASG |
| | | FNISYSYIHWVRQAPGKGLEWVASIYSSSGSTSYADSVKGRFTISADTS |
| | | KNTAYLQMNSLRAEDTAVYYCARGAIDYWGQGTLVTVSSASTKGPSV |
| | | FPLAPSSKSTSGGTAALGCLVKDYFPEPVTVSWNSGALTSGVHTFPAVLQ |
| | | SSGLYSLSSVVTVPSSSLGTQTYICNVNHKPSNTKVDKKVEPKSCDKTHTC |
| | | PPCPAPEAAGGPSVFLFPPKPKDTLMISRTPEVTCVVVDVSHEDPEVKFNW |
| | | YVDGVEVHNAKTKPREEQYNSTYRVVSVLTVLHQDWLNGKEYKCKVSN |
| | | KALGAPIEKTISKAKGQPREPQVYTLPPSREEMTKNQVSLTCLVKGFYPSD |
| | | IAVEWESNGQPENNYKTTPPVLDSDGSFFLYSKLTVDKSRWQQGNVFSCS |
| | | VMHEALHNHYTQKSLSLSPGK |
| | | >F58 LC SEQ ID NO: 68 |
| | | DIQMTQSPSSLSASVGDRVTITCRASQSVSSAVAWYQQKPGKAPKLLI |
| | | YSASSLYSGVPSRFSGSRSGTDFTLTISSLQPEDFATYYCQQWYSSGHV |
| | | LITFGQGTKVEIKRTVAAPSVFIFPPSDEQLKSGTASVVCLLNNFYPREAK |
| | | VQWKVDNALQSGNSQESVTEQDSKDSTYSLSSTLTLSKADYEKHKVYAC |
| | | EVTHQGLSSPVTKSFNRGEC |
| N-HC- | L6-N-HC | L6-N-HC appended ScFv-F4-2-IgG HC SEQ ID NO: 69 |
| appended | appended | EVQLVESGGGLVQPGGSLRLSCAASGFTFTSYYISWVRQAPGKGLEW |
| ScFv-IgG | ScFv-F4-2- | VAEISPYSGSTYYADSVKGRFTISADTSKNTAYLQMNSLRAEDTAVYY |
| | IgG | CALRARPPIRLHPRGSVMDYWGQGTLVTVSSGSAASGSSGGSSSGADIQ |
| | | MTQSPSSLSASVGDRVTITCRASQDVSTAVAWYQQKPGKAPKLLIYSA |
| | | SFLYSGVPSRFSGSGSGTDFTLTISSLQPEDFATYYCQQSYTTPPTFGQ |
| | | GTKVEIKGGGGSGGGGSGGGGSEVQLVESGGGLVQPGGSLRLSCAASG |
| | | FNISYYYIHWVRQAPGKGLEWVASIYPSSGYTYYADSVKGRFTISADT |
| | | SKNTAYLQMNSLRAEDTAVYYCARSSFYWAMDYWGQGTLVTVSSAS |
| | | TKGPSVFPLAPSSKSTSGGTAALGCLVKDYFPEPVTVSWNSGALTSGVHT |
| | | FPAVLQSSGLYSLSSVVTVPSSSLGTQTYICNVNHKPSNTKVDKKVEPKSC |
| | | DKTHTCPPCPAPEAAGGPSVFLFPPKPKDTLMISRTPEVTCVVVDVSHEDP |
| | | EVKFNWYVDGVEVHNAKTKPREEQYNSTYRVVSVLTVLHQDWLNGKE |
| | | YKCKVSNKALGAPIEKTISKAKGQPREPQVYTLPPSREEMTKNQVSLTCL |
| | | VKGFYPSDIAVEWESNGQPENNYKTTPPVLDSDGSFFLYSKLTVDKSRWQ |
| | | QGNVFSCSVMHEALHNHYTQKSLSLSPGK |
| | | >F4-2 LC SEQ ID NO: 70 |
| | | DIQMTQSPSSLSASVGDRVTITCRASQSVSSAVAWYQQKPGKAPKLLI |
| | | YSASSLYSGVPSRFSGSRSGTDFTLTISSLQPEDFATYYCQQSYAAYLFT |
| | | FGQGTKVEIKRTVAAPSVFIFPPSDEQLKSGTASVVCLLNNFYPREAKVQ |
| | | WKVDNALQSGNSQESVTEQDSKDSTYSLSSTLTLSKADYEKHKVYACEV |
| | | THQGLSSPVTKSFNRGEC |
| N-HC- | L6-N-HC | L6-N-HC appended ScFv-F4-IgG HC SEQ ID NO: 71 |
| appended | appended | EVQLVESGGGLVQPGGSLRLSCAASGFTFTSYYISWVRQAPGKGLEW |
| ScFv-IgG | ScFv-F4- | VAEISPYSGSTYYADSVKGRFTISADTSKNTAYLQMNSLRAEDTAVYY |
| | IgG | CALRARPPIRLHPRGSVMDYWGQGTLVTVSSGSAASGSSGGSSSGADIQ |
| | | MTQSPSSLSASVGDRVTITCRASQDVSTAVAWYQQKPGKAPKLLIYSA |
| | | SFLYSGVPSRFSGSGSGTDFTLTISSLQPEDFATYYCQQSYTTPPTFGQ |
| | | GTKVEIKGGGGSGGGGSGGGGSEVQLVESGGGLVQPGGSLRLSCAASG |
| | | FNLSSYSMHWVRQAPGKGLEWVAYISSYYGYTYYADSVKGRFTISAD |
| | | TSKNTAYLQMNSLRAEDTAVYYCARPAPGHWGFDYWGQGTLVTVSS |
| | | ASTKGPSVFPLAPSSKSTSGGTAALGCLVKDYFPEPVTVSWNSGALTSGV |
| | | HTFPAVLQSSGLYSLSSVVTVPSSSLGTQTYICNVNHKPSNTKVDKKVEPK |
| | | SCDKTHTCPPCPAPEAAGGPSVFLFPPKPKDTLMISRTPEVTCVVVDVSHE |
| | | DPEVKFNWYVDGVEVHNAKTKPREEQYNSTYRVVSVLTVLHQDWLNGK |
| | | EYKCKVSNKALGAPIEKTISKAKGQPREPQVYTLPPSREEMTKNQVSLTCL |
| | | VKGFYPSDIAVEWESNGQPENNYKTTPPVLDSDGSFFLYSKLTVDKSRWQ |
| | | QGNVFSCSVMHEALHNHYTQKSLSLSPGK |
| | | >F4 LC SEQ ID NO: 72 |
| | | DIQMTQSPSSLSASVGDRVTITCRASQSVSSAVAWYQQKPGKAPKLLI |
| | | YSASSLYSGVPSRFSGSRSGTDFTLTISSLQPEDFATYYCQQWYYAPIT |
| | | FGQGTKVEIKRTVAAPSVFIFPPSDEQLKSGTASVVCLLNNFYPREAKVQ |
| | | WKVDNALQSGNSQESVTEQDSKDSTYSLSSTLTLSKADYEKHKVYACEV |
| | | THQGLSSPVTKSFNRGEC |
| N-HC- | L6-N-HC | L6-N-HC appended ScFv-F49-IgG SEQ ID NO: 73 |
| appended | appended | EVQLVESGGGLVQPGGSLRLSCAASGFTFTSYYISWVRQAPGKGLEW |
| ScFv-IgG | ScFv-F49- | VAEISPYSGSTYYADSVKGRFTISADTSKNTAYLQMNSLRAEDTAVYY |
| | IgG | CALRARPPIRIHPRGSVMDYWGQGTLVTVSSGSAASGSSGGSSSGADIQ |
| | | MTQSPSSLSASVGDRVTITCRASQDVSTAVAWYQQKPGKAPKLLIYSA |
| | | SFLYSGVPSRFSGSGSGTDFTLTISSLQPEDFATYYCQQSYTTPPTFGQ |
| | | GTKVEIKGGGGSGGGGSGGGGSQVQLVQSGAEVKKPGASVKVSCKAS |
| | | GGTFSSYAISWVRQAPGQGLEWMGWINAGNGNTTYAQKFQGRVTM |
| | | TRQTSTSTVYMELSSLRSEDTAVYYCARHYYGSGSYPDWGQGTLVTV |
| | | SSASTKGPSVFPLAPSSKSTSGGTAALGCLVKDYFPEPVTVSWNSGALTSG |
| | | VHTFPAVLQSSGLYSLSSVVTVPSSSLGTQTYICNVNHKPSNTKVDKKVEP |
| | | KSCDKTHTCPPCPAPEAAGGPSVFLFPPKPKDTLMISRTPEVTCVVVDVSH |
| | | EDPEVKFNWYVDGVEVHNAKTKPREEQYNSTYRVVSVLTVLHQDWLNG |
| | | KEYKCKVSNKALGAPIEKTISKAKGQPREPQVYTLPPSREEMTKNQVSLT |
| | | CLVKGFYPSDIAVEWESNGQPENNYKTTPPVLDSDGSFFLYSKLTVDKSR |
| | | WQQGNVFSCSVMHEALHNHYTQKSLSLSPGK |
| | | >F49 LC SEQ ID NO: 74 |
| | | DIQMTQSPSSPSASVGDRVTITCRASQSISSYLNWYQQKPGKAPKLLIY |
| | | AASSLQSGVPSRFSGSGSGTDFTLTISSLQPEDFATYYCQQSYSTPLTFG |
| | | GGTKVEIKRTVAAPSVFIFPPSDEQLKSGTASVVCLLNNFYPREAKVQWK |
| | | VDNALQSGNSQESVTEQDSKDSTYSLSSTLTLSKADYEKHKVYACEVTH |
| | | QGLSSPVTKSFNRGEC |
| N-HC- | L6-N-HC | L6-N-HC appended ScFv-F10-IgG HC SEQ ID NO: 75 |
| appended | appended | EVQLVESGGGLVQPGGSLRLSCAASGFTFTSYYISWVRQAPGKGLEW |
| ScFv-IgG | ScFv-F10- | VAEISPYSGSTYYADSVKGRFTISADTSKNTAYLQMNSLRAEDTAVYY |
| | IgG | CALRARPPIRLHPRGSVMDYWGQGTLVTVSSGSAASGSSGGSSSGADIQ |
| | | MTQSPSSLSASVGDRVTITCRASQDVSTAVAWYQQKPGKAPKLLIYSA |
| | | SFLYSGVPSRFSGSGSGTDFTLTISSLQPEDFATYYCQQSYTTPPTFGQ |
| | | GTKVEIKGGGGSGGGGSGGGGSEVQLVESGGGLVQPGGSLRLSCAASG |
| | | FTFSSFNMFWVRQAPGKGLEWVAGIDDDGSYPNYGSAVKGRATISRD |
| | | NSKNTLYLQMNSLRAEDTAVYYCAKSGYGGSWGGYIADDIDAWGQG |
| | | TLVTVSSASTKGPSVFPLAPSSKSTSGGTAALGCLVKDYFPEPVTVSWNS |
| | | GALTSGVHTFPAVLQSSGLYSLSSVVTVPSSSLGTQTYICNVNHKPSNTKV |
| | | DKKVEPKSCDKTHTCPPCPAPEAAGGPSVFLFPPKPKDTLMISRTPEVTCV |
| | | VVDVSHEDPEVKFNWYVDGVEVHNAKTKPREEQYNSTYRVVSVLTVLH |
| | | QDWLNGKEYKCKVSNKALGAPIEKTISKAKGQPREPQVYTLPPSREEMTK |
| | | NQVSLTCLVKGFYPSDIAVEWESNGQPENNYKTTPPVLDSDGSFFLYSKL |
| | | TVDKSRWQQGNVFSCSVMHEALHNHYTQKSLSLSPGK |
| | | >F10 LC SEQ ID NO: 76 |
| | | ELTQPPSVSVSPGQTARITCSGDGSYAGSYYYGWYQQKPGQAPVTLIY |
| | | YNNKRPSGIPERFSGSLSGSTNTLTISGVQAEDEADYYCGSADNSGAAF |
| | | GGGTKLTVLRTVAAPSVFIFPPSDEQLKSGTASVVCLLNNFYPREAKVQ |
| | | WKVDNALQSGNSQESVTEQDSKDSTYSLSSTLTLSKADYEKHKVYACEV |
| | | THQGLSSPVTKSFNRGEC |
| N-HC- | L6-N-HC- | L6-N-HC appended ScFv-F7B-IgG HC SEQ ID NO: 189 |
| appended | Appended | EVQLVESGGGLVQPGGSLRLSCAASGFTFTSYYISWVRQAPGKGLEW |
| ScFv-IgG | ScFv-F7B- | VAEISPYSGSTYYADSVKGRFTISADTSKNTAYLQMNSLRAEDTAVYY |
| | IgG | CALRARPPIRLHPRGSVMDYWGQGTLVTVSSGSAASGSSGGSSSGADIQ |
| | | MTQSPSSLSASVGDRVTITCRASQDVSTAVAWYQQKPGKAPKLLIYSA |
| | | SFLYSGVPSRFSGSGSGTDFTLTISSLQPEDFATYYCQQSYTTPPTFGQ |
| | | GTKVEIKGGGGSGGGGSGGGGSEVQLVESGGGLVQPGGSLRLSCAASG |
| | | FNFSSSSIHWVRQAPGKGLEWVAYIYPSYDYTYYADSVKGRFTISADT |
| | | SKNTAYLQMNSLRAEDTAVYYCARGYFYTWGGMDYWGQGTLVTVS |
| | | SASTKGPSVFPLAPSSKSTSGGTAALGCLVKDYFPEPVTVSWNSGALTSGV |
| | | HTFPAVLQSSGLYSLSSVVTVPSSSLGTQTYICNVNHKPSNTKVDKKVEPK |
| | | SCDKTHTCPPCPAPEAAGGPSVFLFPPKPKDTLMISRTPEVTCVVVDVSHE |
| | | DPEVKFNWYVDGVEVHNAKTKPREEQYNSTYRVVSVLTVLHQDWLNGK |
| | | EYKCKVSNKALGAPIEKTISKAKGQPREPQVYTLPPSREEMTKNQVSLTCL |
| | | VKGFYPSDIAVEWESNGQPENNYKTTPPVLDSDGSFFLYSKLTVDKSRWQ |
| | | QGNVFSCSVMHEALHNHYTQKSLSLSPGK |
| | | F7B LC SEQ ID NO: 190 |
| | | DIQMTQSPSSLSASVGDRVTITCRASQSVSSAVAWYQQKPGKAPKLLI |
| | | YSASSLYSGVPSRFSGSRSGTDFTLTISSLQPEDFATYYCQQYYSLFTFG |
| | | QGTKVEIKRTVAAPSVFIFPPSDEQLKSGTASVVCLLNNFYPREAKVQWK |
| | | VDNALQSGNSQESVTEQDSKDSTYSLSSTLTLSKADYEKHKVYACEVTH |
| | | QGLSSPVTKSFNRGEC |
| N-HC- | L6-N-HC- | L6-N-HC appended ScFv-F2I-IgG HC SEQ ID NO: 191 |
| appended | Appended | EVQLVESGGGLVQPGGSLRLSCAASGFTFTSYYISWVRQAPGKGLEW |
| ScFv-IgG | ScFv-F2I- | VAEISPYSGSTYYADSVKGRFTISADTSKNTAYLQMNSLRAEDTAVYY |
| | IgG | CALRARPPIRLHPRGSVMDYWGQGTLVTVSSGSAASGSSGGSSSGADIQ |
| | | MTQSPSSLSASVGDRVTITCRASQDVSTAVAWYQQKPGKAPKLLIYSA |
| | | SFLYSGVPSRFSGSGSGTDFTLTISSLQPEDFATYYCQQSYTTPPTFGQ |
| | | GTKVEIKGGGGSGGGGSGGGGSEVQLVESGGGLVQPGGSLRLSCAASG |
| | | FNIHSSSIHWVRQAPGKGLEWVAATYSSFGSITYADSVKGRFTISADTS |
| | | KNTAYLQMNSLRAEDTAVYYCARYHHPFGYALDYWGQGTLVTVSSA |
| | | STKGPSVFPLAPSSKSTSGGTAALGCLVKDYFPEPVTVSWNSGALTSGVH |
| | | TFPAVLQSSGLYSLSSVVTVPSSSLGTQTYICNVNHKPSNTKVDKKVEPKS |
| | | CDKTHTCPPCPAPEAAGGPSVFLFPPKPKDTLMISRTPEVTCVVVDVSHED |
| | | PEVKFNWYVDGVEVHNAKTKPREEQYNSTYRVVSVLTVLHQDWLNGKE |
| | | YKCKVSNKALGAPIEKTISKAKGQPREPQVYTLPPSREEMTKNQVSLTCL |
| | | VKGFYPSDIAVEWESNGQPENNYKTTPPVLDSDGSFFLYSKLTVDKSRWQ |
| | | QGNVFSCSVMHEALHNHYTQKSLSLSPGK |
| | | F2I LC SEQ ID NO: 192 |
| | | DIQMTQSPSSLSASVGDRVTITCRASQSVSSAVAWYQQKPGKAPKLLI |
| | | YSASSLYSGVPSRFSGSRSGTDFTLTISSLQPEDFATYYCQQGVYLFTF |
| | | GQGTKVEIKRTVAAPSVFIFPPSDEQLKSGTASVVCLLNNFYPREAKVQW |
| | | KVDNALQSGNSQESVTEQDSKDSTYSLSSTLTLSKADYEKHKVYACEVT |
| | | HQGLSSPVTKSFNRGEC |
| N-HC | L6-N-HC | L6-N-HC appended ScFv-F12578-IgG-Knob-His HC SEQ ID NO: 77 |
| appended | appended | EVQLVESGGGLVQPGGSLRLSCAASGFTFTSYYISWVRQAPGKGLEW |
| ScFv-IgG- | ScFv- | VAEISPYSGSTYYADSVKGRFTISADTSKNTAYLQMNSLRAEDTAVYY |
| Knob-his + | F12578- | CALRARPPIRLHPRGSVMDYWGQGTLVTVSSGSAASGSSGGSSSGADIQ |
| IgG-Hole- | IgG-Knob- | MTQSPSSLSASVGDRVTITCRASQDVSTAVAWYQQKPGKAPKLLIYSA |
| Flag | his + | SFLYSGVPSRFSGSGSGTDFTLTISSLQPEDFATYYCQQSYTTPPTFGQ |
| | F12578- | GTKVEIKGGGGSGGGGSGGGGSEVQLVESGGGLVQPGGSLRLSCAASG |
| | IgG-Hole- | FTFSHYTLSWVRQAPGKGLEWVSVISGDGSYTYYADSVKGRFTISSDN |
| | Flag | SKNTLYLQMNSLRAEDTAVYYCARNFIKYVFANWGQGTLVTVSSAST |
| | | KGPSVFPLAPSSKSTSGGTAALGCLVKDYFPEPVTVSWNSGALTSGVHTFP |
| | | AVLQSSGLYSLSSVVTVPSSSLGTQTYICNVNHKPSNTKVDKKVEPKSCD |
| | | KTHTCPPCPAPEAAGGPSVFLFPPKPKDTLMISRTPEVTCVVVDVSHEDPE |
| | | VKFNWYVDGVEVHNAKTKPREEQYNSTYRVVSVLTVLHQDWLNGKEY |
| | | KCKVSNKALGAPIEKTISKAKGQPREPQVYTLPPSREEMTKNQVSLWCLV |
| | | KGFYPSDIAVEWESNGQPENNYKTTPPVLDSDGSFFLYSKLTVDKSRWQQ |
| | | GNVFSCSVMHEALHNHYTQKSLSLSPGKGSGSGHHHHHH |
| | | > F12578-IgG-Hole Flag HC SEQ ID NO: 78 |
| | | EVQLVESGGGLVQPGGSLRLSCAASGFTFSHYTLSWVRQAPGKGLE |
| | | WVSVISGDGSYTYYADSVKGRFTISSDNSKNTLYLQMNSLRAEDTAVY |
| | | YCARNFIKYVFANWGQGTLVTVSSASTKGPSVFPLAPSSKSTSGGTAAL |
| | | GCLVKDYFPEPVTVSWNSGALTSGVHTFPAVLQSSGLYSLSSVVTVPSSSL |
| | | GTQTYICNVNHKPSNTKVDKKVEPKSCDKTHTCPPCPAPEAAGGPSVFLF |
| | | PPKPKDTLMISRTPEVTCVVVDVSHEDPEVKFNWYVDGVEVHNAKTKPR |
| | | EEQYNSTYRVVSVLTVLHQDWLNGKEYKCKVSNKALGAPIEKTISKAKG |
| | | QPREPQVYTLPPSREEMTKNQVSLSCAVKGFYPSDIAVEWESNGQPENNY |
| | | KTTPPVLDSDGSFFLVSKLTVDKSRWQQGNVFSCSVMHEALHNHYTQKS |
| | | LSLSPGKGSGSGDYKDDDDK |
| | | >F12578 LC SEQ ID NO: 79 |
| | | DIELTQPPSVSVAPGQTARISCSGDNIGSFYVHWYQQKPGQAPVLVIY |
| | | DKSNRPSGIPERFSGSNSGNTATLTISGTQAEDEADYYCQSYANTLSLV |
| | | FGGGTKLTVLGPPKAAPSVTLFPPSSEELPANKATLVCLISDFYPGAVTV |
| | | AWKADSSPVKAGVETTTPSKPSNNKYAASSYLSLTPEPWKSHRSYSCPV |
| | | THEGSTVEKTVAPTECS |
| N-HC | L6-N-HC | L6-N-HC appended ScFv-F127-IgG-Knob-His HC SEQ ID NO: 80 |
| appended | appended | EVQLVESGGGLVQPGGSLRLSCAASGFTFTSYYISWVRQAPGKGLEW |
| ScFv-IgG- | ScFv-F127- | VAEISPYSGSTYYADSVKGRFTISADTSKNTAYLQMNSLRAEDTAVYY |
| Knob-his + | IgG-Knob- | CALRARPPIRLHPRGSVMDYWGQGTLVTVSSGSAASGSSGGSSSGADIQ |
| IgG-Hole- | his + F127- | MTQSPSSLSASVGDRVTITCRASQDVSTAVAWYQQKPGKAPKLLIYSA |
| Flag | IgG-Hole- | SFLYSGVPSRFSGSGSGTDFTLTISSLQPEDFATYYCQQSYTTPPTFGQ |
| | Flag | GTKVEIKGGGGSGGGGSGGGGSEVQLVESGGGLVQPGGSLRLSCAASG |
| | | FNISSSYIHWVRQAPGKGLEWVAYIYSSYGSTYYADSVKGRFTISADTS |
| | | KNTAYLQMNSLRAEDTAVYYCARASWYALDYWGQGTLVTVSSASTK |
| | | GPSVFPLAPSSKSTSGGTAALGCLVKDYFPEPVTVSWNSGALTSGVHTFPA |
| | | VLQSSGLYSLSSVVTVPSSSLGTQTYICNVNHKPSNTKVDKKVEPKSCDKT |
| | | HTCPPCPAPEAAGGPSVFLFPPKPKDTLMISRTPEVTCVVVDVSHEDPEVK |
| | | FNWYVDGVEVHNAKTKPREEQYNSTYRVVSVLTVLHQDWLNGKEYKC |
| | | KVSNKALGAPIEKTISKAKGPPREPPVYTLPPSREEMTKNPVSLWCLVKG |
| | | FYPSDIAVEWESNGPPENNYKTTPPVLDSDGSFFLYSKLTVDKSRWPPGN |
| | | VFSCSVMHEALHNHYTQKSLSLSPGKGSGSGHHHHHH |
| | | > F127-IgG-Hole Flag HC SEQ ID NO: 81 |
| | | EVQLVESGGGLVQPGGSLRLSCAASGFNISSSYIHWVRQAPGKGLEW |
| | | VAYIYSSYGSTYYADSVKGRFTISADTSKNTAYLQMNSLRAEDTAVYY |
| | | CARASWYALDYWGQGTLVTVSSASTKGPSVFPLAPSSKSTSGGTAALG |
| | | CLVKDYFPEPVTVSWNSGALTSGVHTFPAVLQSSGLYSLSSVVTVPSSSLG |
| | | TPTYICNVNHKPSNTKVDKKVEPKSCDKTHTCPPCPAPEAAGGPSVFLFPP |
| | | KPKDTLMISRTPEVTCVVVDVSHEDPEVKFNWYVDGVEVHNAKTKPREE |
| | | QYNSTYRVVSVLTVLHQDWLNGKEYKCKVSNKALGAPIEKTISKAKGQP |
| | | REPQVYTLPPSREEMTKNQVSLSCAVKGFYPSDIAVEWESNGQPENNYKT |
| | | TPPVLDSDGSFFLVSKLTVDKSRWQQGNVFSCSVMHEALHNHYTQKSLS |
| | | LSPGKGSGSGDYKDDDDK |
| | | >F127 LC SEQ ID NO: 82 |
| | | DIQMTQSPSSLSASVGDRVTITCRASQSVSSAVAWYQQKPGKAPKLLI |
| | | YSASSLYSGVPSRFSGSRSGTDFTLTISSLQPEDFATYYCQQYWYGVAP |
| | | ITFGQGTKVEIKRTVAAPSVFIFPPSDEQLKSGTASVVCLLNNFYPREAKV |
| | | QWKVDNALQSGNSQESVTEQDSKDSTYSLSSTLTLSKADYEKHKVYACE |
| | | VTHQGLSSPVTKSFNRGEC |
| N-HC | L6-N-HC | L6-N-HC appended ScFv-F58-IgG-Knob-His HC SEQ ID NO: 83 |
| appended | appended | EVQLVESGGGLVQPGGSLRLSCAASGFTFTSYYISWVRQAPGKGLEW |
| ScFv-IgG- | ScFv-F58- | VAEISPYSGSTYYADSVKGRFTISADTSKNTAYLQMNSLRAEDTAVYY |
| Knob-his + | IgG-Knob- | CALRARPPIRLHPRGSVMDYWGQGTLVTVSSGSAASGSSGGSSSGADIQ |
| IgG-Hole- | his + F58- | MTQSPSSLSASVGDRVTITCRASQDVSTAVAWYQQKPGKAPKLLIYSA |
| Flag | IgG-Hole- | SFLYSGVPSRFSGSGSGTDFTLTISSLQPEDFATYYCQQSYTTPPTFGQ |
| | Flag | GTKVEIKGGGGSGGGGSGGGGSEVQLVESGGGLVQPGGSLRLSCAASG |
| | | FNISYSYIHWVRQAPGKGLEWVASIYSSSGSTSYADSVKGRFTISADTS |
| | | KNTAYLQMNSLRAEDTAVYYCARGAIDYWGQGTLVTVSSASTKGPSV |
| | | FPLAPSSKSTSGGTAALGCLVKDYFPEPVTVSWNSGALTSGVHTFPAVLQ |
| | | SSGLYSLSSVVTVPSSSLGTQTYICNVNHKPSNTKVDKKVEPKSCDKTHTC |
| | | PPCPAPEAAGGPSVFLFPPKPKDTLMISRTPEVTCVVVDVSHEDPEVKFNW |
| | | YVDGVEVHNAKTKPREEQYNSTYRVVSVLTVLHQDWLNGKEYKCKVSN |
| | | KALGAPIEKTISKAKGQPREPQVYTLPPSREEMTKNQVSLWCLVKGFYPS |
| | | DIAVEWESNGQPENNYKTTPPVLDSDGSFFLYSKLTVDKSRWQQGNVFSC |
| | | SVMHEALHNHYTQKSLSLSPGKGSGSGHHHHHH |
| | | > F58-IgG-Hole Flag HC SEQ ID NO: 84 |
| | | EVQLVESGGGLVQPGGSLRLSCAASGFNISYSYIHWVRQAPGKGLEW |
| | | VASIYSSSGSTSYADSVKGRFTISADTSKNTAYLQMNSLRAEDTAVYYC |
| | | ARGAIDYWGQGTLVTVSSASTKGPSVFPLAPSSKSTSGGTAALGCLVKD |
| | | YFPEPVTVSWNSGALTSGVHTFPAVLQSSGLYSLSSVVTVPSSSLGTQTYI |
| | | CNVNHKPSNTKVDKKVEPKSCDKTHTCPPCPAPEAAGGPSVFLFPPKPKD |
| | | TLMISRTPEVTCVVVDVSHEDPEVKFNWYVDGVEVHNAKTKPREEQYNS |
| | | TYRVVSVLTVLHQDWLNGKEYKCKVSNKALGAPIEKTISKAKGQPREPQ |
| | | VYTLPPSREEMTKNQVSLSCAVKGFYPSDIAVEWESNGQPENNYKTTPPV |
| | | LDSDGSFFLVSKLTVDKSRWQQGNVFSCSVMHEALHNHYTQKSLSLSPG |
| | | KGSGSGDYKDDDDK |
| | | >F58 LC SEQ ID NO: 85 |
| | | DIQMTQSPSSLSASVGDRVTITCRASQSVSSAVAWYQQKPGKAPKLLI |
| | | YSASSLYSGVPSRFSGSRSGTDFTLTISSLQPEDFATYYCQQWYSSGHV |
| | | LITFGQGTKVEIKRTVAAPSVFIFPPSDEQLKSGTASVVCLLNNFYPREAK |
| | | VQWKVDNALQSGNSQESVTEQDSKDSTYSLSSTLTLSKADYEKHKVYAC |
| | | EVTHQGLSSPVTKSFNRGEC |
| N-HC | L6-N-HC | L6-N-HC appended ScFv-F4-2-IgG-Knob-His HC SEQ ID NO: 86 |
| appended | appended | EVQLVESGGGLVQPGGSLRLSCAASGFTFTSYYISWVRQAPGKGLEW |
| ScFv-IgG- | ScFv-F4-2- | VAEISPYSGSTYYADSVKGRFTISADTSKNTAYLQMNSLRAEDTAVYY |
| Knob-his + | IgG-Knob- | CALRARPPIRLHPRGSVMDYWGQGTLVTVSSGSAASGSSGGSSSGADIQ |
| IgG-Hole- | his + F4-2- | MTQSPSSLSASVGDRVTITCRASQDVSTAVAWYQQKPGKAPKLLIYSA |
| Flag | IgG-Hole- | SFLYSGVPSRFSGSGSGTDFTLTISSLQPEDFATYYCQQSYTTPPTFGQ |
| | Flag | GTKVEIKGGGGSGGGGSGGGGSEVQLVESGGGLVQPGGSLRLSCAASG |
| | | FNISYYYIHWVRQAPGKGLEWVASIYPSSGYTYYADSVKGRFTISADT |
| | | SKNTAYLQMNSLRAEDTAVYYCARSSFYWAMDYWGQGTLVTVSSAS |
| | | TKGPSVFPLAPSSKSTSGGTAALGCLVKDYFPEPVTVSWNSGALTSGVHT |
| | | FPAVLQSSGLYSLSSVVTVPSSSLGTQTYICNVNHKPSNTKVDKKVEPKSC |
| | | DKTHTCPPCPAPEAAGGPSVFLFPPKPKDTLMISRTPEVTCVVVDVSHEDP |
| | | EVKFNWYVDGVEVHNAKTKPREEQYNSTYRVVSVLTVLHQDWLNGKE |
| | | YKCKVSNKALGAPIEKTISKAKGQPREPQVYTLPPSREEMTKNQVSLWCL |
| | | VKGFYPSDIAVEWESNGQPENNYKTTPPVLDSDGSFFLYSKLTVDKSRWQ |
| | | QGNVFSCSVMHEALHNHYTQKSLSLSPGKGSGSGHHHHHH |
| | | > F4-2-IgG-Hole Flag HC SEQ ID NO: 87 |
| | | EVQLVESGGGLVQPGGSLRLSCAASGFNISYYYIHWVRQAPGKGLEW |
| | | VASIYPSSGYTYYADSVKGRFTISADTSKNTAYLQMNSLRAEDTAVYY |
| | | CARSSFYWAMDYWGQGTLVTVSSASTKGPSVFPLAPSSKSTSGGTAAL |
| | | GCLVKDYFPEPVTVSWNSGALTSGVHTFPAVLQSSGLYSLSSVVTVPSSSL |
| | | GTQTYICNVNHKPSNTKVDKKVEPKSCDKTHTCPPCPAPEAAGGPSVFLF |
| | | PPKPKDTLMISRTPEVTCVVVDVSHEDPEVKFNWYVDGVEVHNAKTKPR |
| | | EEQYNSTYRVVSVLTVLHQDWLNGKEYKCKVSNKALGAPIEKTISKAKG |
| | | QPREPQVYTLPPSREEMTKNQVSLSCAVKGFYPSDIAVEWESNGQPENNY |
| | | KTTPPVLDSDGSFFLVSKLTVDKSRWQQGNVFSCSVMHEALHNHYTQKS |
| | | LSLSPGKGSGSGDYKDDDDK |
| | | >F4-2 LC SEQ ID NO: 88 |
| | | DIQMTQSPSSLSASVGDRVTITCRASQSVSSAVAWYQQKPGKAPKLLI |
| | | YSASSLYSGVPSRFSGSRSGTDFTLTISSLQPEDFATYYCQQSYAAYLFT |
| | | FGQGTKVEIKRTVAAPSVFIFPPSDEQLKSGTASVVCLLNNFYPREAKVQ |
| | | WKVDNALQSGNSQESVTEQDSKDSTYSLSSTLTLSKADYEKHKVYACEV |
| | | THQGLSSPVTKSFNRGEC |
| N-HC | L6-N-HC | L6-N-HC appended ScFv-F4-IgG-Knob-His HC SEQ ID NO: 89 |
| appended | appended | EVQLVESGGGLVQPGGSLRLSCAASGFTFTSYYISWVRQAPGKGLEW |
| ScFv-IgG- | ScFv-F4- | VAEISPYSGSTYYADSVKGRFTISADTSKNTAYLQMNSLRAEDTAVYY |
| Knob-his + | IgG-Knob- | CALRARPPIRLHPRGSVMDYWGQGTLVTVSSGSAASGSSGGSSSGADIQ |
| IgG-Hole- | his + F4- | MTQSPSSLSASVGDRVTITCRASQDVSTAVAWYQQKPGKAPKLLIYSA |
| Flag | IgG-Hole- | SFLYSGVPSRFSGSGSGTDFTLTISSLQPEDFATYYCQQSYTTPPTFGQ |
| | Flag | GTKVEIKGGGGSGGGGSGGGGSEVQLVESGGGLVQPGGSLRLSCAASG |
| | | FNLSSYSMHWVRQAPGKGLEWVAYISSYYGYTYYADSVKGRFTISAD |
| | | TSKNTAYLQMNSLRAEDTAVYYCARPAPGHWGFDYWGQGTLVTVSS |
| | | ASTKGPSVFPLAPSSKSTSGGTAALGCLVKDYFPEPVTVSWNSGALTSGV |
| | | HTFPAVLQSSGLYSLSSVVTVPSSSLGTQTYICNVNHKPSNTKVDKKVEPK |
| | | SCDKTHTCPPCPAPEAAGGPSVFLFPPKPKDTLMISRTPEVTCVVVDVSHE |
| | | DPEVKFNWYVDGVEVHNAKTKPREEQYNSTYRVVSVLTVLHQDWLNGK |
| | | EYKCKVSNKALGAPIEKTISKAKGQPREPQVYTLPPSREEMTKNQVSLWC |
| | | LVKGFYPSDIAVEWESNGQPENNYKTTPPVLDSDGSFFLYSKLTVDKSRW |
| | | QQGNVFSCSVMHEALHNHYTQKSLSLSPGKGSGSGHHHHHH |
| | | > F4-IgG-Hole Flag HC SEQ ID NO: 90 |
| | | EVQLVESGGGLVQPGGSLRLSCAASGFNLSSYSMHWVRQAPGKGLE |
| | | WVAYISSYYGYTYYADSVKGRFTISADTSKNTAYLQMNSLRAEDTAV |
| | | YYCARPAPGHWGFDYWGQGTLVTVSSASTKGPSVFPLAPSSKSTSGGT |
| | | AALGCLVKDYFPEPVTVSWNSGALTSGVHTFPAVLQSSGLYSLSSVVTVP |
| | | SSSLGTQTYICNVNHKPSNTKVDKKVEPKSCDKTHTCPPCPAPEAAGGPS |
| | | VFLFPPKPKDTLMISRTPEVTCVVVDVSHEDPEVKFNWYVDGVEVHNAK |
| | | TKPREEQYNSTYRVVSVLTVLHQDWLNGKEYKCKVSNKALGAPIEKTISK |
| | | AKGQPREPQVYTLPPSREEMTKNQVSLSCAVKGFYPSDIAVEWESNGQPE |
| | | NNYKTTPPVLDSDGSFFLVSKLTVDKSRWQQGNVFSCSVMHEALHNHYT |
| | | QKSLSLSPGKGSGSGDYKDDDDK |
| | | >F4 LC SEQ ID NO: 91 |
| | | DIQMTQSPSSLSASVGDRVTITCRASQSVSSAVAWYQQKPGKAPKLLI |
| | | YSASSLYSGVPSRFSGSRSGTDFTLTISSLQPEDFATYYCQQWYYAPIT |
| | | FGQGTKVEIKRTVAAPSVFIFPPSDEQLKSGTASVVCLLNNFYPREAKVQ |
| | | WKVDNALQSGNSQESVTEQDSKDSTYSLSSTLTLSKADYEKHKVYACEV |
| | | THQGLSSPVTKSFNRGEC |
| N-HC | L6-N-HC | L6-N-HC appended ScFv-F49-IgG-Knob-His HC SEQ ID NO: 92 |
| appended | appended | EVQLVESGGGLVQPGGSLRLSCAASGFTFTSYYISWVRQAPGKGLEW |
| ScFv-IgG- | ScFv-F49- | VAEISPYSGSTYYADSVKGRFTISADTSKNTAYLQMNSLRAEDTAVYY |
| Knob-his + | IgG-Knob- | CALRARPPIRLHPRGSVMDYWGQGTLVTVSSGSAASGSSGGSSSGADIQ |
| IgG-Hole- | his + F49- | MTQSPSSLSASVGDRVTITCRASQDVSTAVAWYQQKPGKAPKLLIYSA |
| Flag | IgG-Hole- | SFLYSGVPSRFSGSGSGTDFTLTISSLQPEDFATYYCQQSYTTPPTFGQ |
| | Flag | GTKVEIKGGGGSGGGGSGGGGSQVQLVQSGAEVKKPGASVKVSCKAS |
| | | GGTFSSYAISWVRQAPGQGLEWMGWINAGNGNTTYAQKFQGRVTM |
| | | TRDTSTSTVYMELSSLRSEDTAVYYCARHYYGSGSYPDWGQGTLVTV |
| | | SSASTKGPSVFPLAPSSKSTSGGTAALGCLVKDYFPEPVTVSWNSGALTSG |
| | | VHTFPAVLQSSGLYSLSSVVTVPSSSLGTQTYICNVNHKPSNTKVDKKVEP |
| | | KSCDKTHTCPPCPAPEAAGGPSVFLFPPKPKDTLMISRTPEVTCVVVDVSH |
| | | EDPEVKFNWYVDGVEVHNAKTKPREEQYNSTYRVVSVLTVLHQDWLNG |
| | | KEYKCKVSNKALGAPIEKTISKAKGQPREPQVYTLPPSREEMTKNQVSLW |
| | | CLVKGFYPSDIAVEWESNGQPENNYKTTPPVLDSDGSFFLYSKLTVDKSR |
| | | WQQGNVFSCSVMHEALHNHYTQKSLSLSPGKGSGSGHHHHHH |
| | | > F49-IgG-Hole Flag HC SEQ ID NO: 93 |
| | | QVQLVQSGAEVKKPGASVKVSCKASGGTFSSYAISWVRQAPGQGLE |
| | | WMGWINAGNGNTTYAQKFQGRVTMTRDTSTSTVYMELSSLRSEDTA |
| | | VYYCARHYYGSGSYPDWGQGTLVTVSSASTKGPSVFPLAPSSKSTSGGT |
| | | AALGCLVKDYFPEPVTVSWNSGALTSGVHTFPAVLQSSGLYSLSSVVTVP |
| | | SSSLGTQTYICNVNHKPSNTKVDKKVEPKSCDKTHTCPPCPAPEAAGGPS |
| | | VFLFPPKPKDTLMISRTPEVTCVVVDVSHEDPEVKFNWYVDGVEVHNAK |
| | | TKPREEQYNSTYRVVSVLTVLHQDWLNGKEYKCKVSNKALGAPIEKTISK |
| | | AKGQPREPQVYTLPPSREEMTKNQVSLSCAVKGFYPSDIAVEWESNGQPE |
| | | NNYKTTPPVLDSDGSFFLVSKLTVDKSRWQQGNVFSCSVMHEALHNHYT |
| | | QKSLSLSPGKGSGSGDYKDDDDK |
| | | >F49 LC SEQ ID NO: 94 |
| | | DIQMTQSPSSPSASVGDRVTITCRASQSISSYLNWYQQKPGKAPKLLIY |
| | | AASSLQSGVPSRFSGSGSGTDFTLTISSLQPEDFATYYCQQSYSTPLTFG |
| | | GGTKVEIKRTVAAPSVFIFPPSDEQLKSGTASVVCLLNNFYPREAKVQWK |
| | | VDNALQSGNSQESVTEQDSKDSTYSLSSTLTLSKADYEKHKVYACEVTH |
| | | QGLSSPVTKSFNRGEC |
| N-HC | L6-N-HC | L6-N-HC appended ScFv-F10-IgG-Knob-His HC SEQ ID NO: 95 |
| appended | appended | EVQLVESGGGLVQPGGSLRLSCAASGFTFTSYYISWVRQAPGKGLEW |
| ScFv-IgG- | ScFv-F10- | VAEISPYSGSTYYADSVKGRFTISADTSKNTAYLQMNSLRAEDTAVYY |
| Knob-his + | IgG-Knob- | CALRARPPIRLHPRGSVMDYWGQGTLVTVSSGSAASGSSGGSSSGADIQ |
| IgG-Hole- | his + F10- | MTQSPSSLSASVGDRVTITCRASQDVSTAVAWYQQKPGKAPKLLIYSA |
| Flag | IgG-Hole- | SFLYSGVPSRFSGSGSGTDFTLTISSLQPEDFATYYCQQSYTTPPTFGQ |
| | Flag | GTKVEIKGGGGSGGGGSGGGGSEVQLVESGGGLVQPGGSLRLSCAASG |
| | | FTFSSFNMFWVRQAPGKGLEWVAGIDDDGSYPNYGSAVKGRATISRD |
| | | NSKNTLYLQMNSLRAEDTAVYYCAKSGYGGSWGGYIADDIDAWGQG |
| | | TLVTVSSASTKGPSVFPLAPSSKSTSGGTAALGCLVKDYFPEPVTVSWNS |
| | | GALTSGVHTFPAVLQSSGLYSLSSVVTVPSSSLGTQTYICNVNHKPSNTKV |
| | | DKKVEPKSCDKTHTCPPCPAPEAAGGPSVFLFPPKPKDTLMISRTPEVTCV |
| | | VVDVSHEDPEVKFNWYVDGVEVHNAKTKPREEQYNSTYRVVSVLTVLH |
| | | QDWLNGKEYKCKVSNKALGAPIEKTISKAKGQPREPQVYTLPPSREEMTK |
| | | NQVSLWCLVKGFYPSDIAVEWESNGQPENNYKTTPPVLDSDGSFFLYSKL |
| | | TVDKSRWQQGNVFSCSVMHEALHNHYTQKSLSLSPGKGSGSGHHHHHH |
| | | > F10-IgG-Hole Flag HC SEQ ID NO: 96 |
| | | EVQLVESGGGLVQPGGSLRLSCAASGFTFSSFNMFWVRQAPGKGLE |
| | | WVAGIDDDGSYPNYGSAVKGRATISRDNSKNTLYLQMNSLRAEDTAV |
| | | YYCAKSGYGGSWGGYIADDIDAWGQGTLVTVSSASTKGPSVFPLAPSS |
| | | KSTSGGTAALGCLVKDYFPEPVTVSWNSGALTSGVHTFPAVLQSSGLYSL |
| | | SSVVTVPSSSLGTQTYICNVNHKPSNTKVDKKVEPKSCDKTHTCPPCPAPE |
| | | AAGGPSVFLFPPKPKDTLMISRTPEVTCVVVDVSHEDPEVKFNWYVDGVE |
| | | VHNAKTKPREEQYNSTYRVVSVLTVLHQDWLNGKEYKCKVSNKALGAP |
| | | IEKTISKAKGQPREPQVYTLPPSREEMTKNQVSLSCAVKGFYPSDIAVEWE |
| | | SNGQPENNYKTTPPVLDSDGSFFLVSKLTVDKSRWQQGNVFSCSVMHEA |
| | | LHNHYTQKSLSLSPGKGSGSGDYKDDDDK |
| | | >F10 LC SEQ ID NO: 97 |
| | | ELTQPPSVSVSPGQTARITCSGDGSYAGSYYYGWYQQKPGQAPVTLIY |
| | | YNNKRPSGIPERFSGSLSGSTNTLTISGVQAEDEADYYCGSADNSGAAF |
| | | GGGTKLTVLRTVAAPSVFIFPPSDEQLKSGTASVVCLLNNFYPREAKVQ |
| | | WKVDNALQSGNSQESVTEQDSKDSTYSLSSTLTLSKADYEKHKVYACEV |
| | | THQGLSSPVTKSFNRGEC |
| N-HC | L6-N-HC | L6-N-HC appended ScFv-F7B-IgG-Knob-His HC SEQ ID NO: 193 |
| appended | appended | EVQLVESGGGLVQPGGSLRLSCAASGFTFTSYYISWVRQAPGKGLEW |
| ScFv-IgG- | ScFv-F7B- | VAEISPYSGSTYYADSVKGRFTISADTSKNTAYLQMNSLRAEDTAVYY |
| Knob-his + | IgG-Knob- | CALRARPPIRLHPRGSVMDYWGQGTLVTVSSGSAASGSSGGSSSGADIQ |
| IgG-Hole- | his + F7B- | MTQSPSSLSASVGDRVTITCRASQDVSTAVAWYQQKPGKAPKLLIYSA |
| Flag | IgG-Hole- | SFLYSGVPSRFSGSGSGTDFTLTISSLQPEDFATYYCQQSYTTPPTFGQ |
| | Flag | GTKVEIKGGGGSGGGGSGGGGSEVQLVESGGGLVQPGGSLRLSCAASG |
| | | FNFSSSSIHWVRQAPGKGLEWVAYIYPSYDYTYYADSVKGRFTISADT |
| | | SKNTAYLQMNSLRAEDTAVYYCARGYFYTWGGMDYWGQGTLVTVS |
| | | SASTKGPSVFPLAPSSKSTSGGTAALGCLVKDYFPEPVTVSWNSGALTSGV |
| | | HTFPAVLQSSGLYSLSSVVTVPSSSLGTQTYICNVNHKPSNTKVDKKVEPK |
| | | SCDKTHTCPPCPAPEAAGGPSVFLFPPKPKDTLMISRTPEVTCVVVDVSHE |
| | | DPEVKFNWYVDGVEVHNAKTKPREEQYNSTYRVVSVLTVLHQDWLNGK |
| | | EYKCKVSNKALGAPIEKTISKAKGQPREPQVYTLPPSREEMTKNQVSLWC |
| | | LVKGFYPSDIAVEWESNGQPENNYKTTPPVLDSDGSFFLYSKLTVDKSRW |
| | | QQGNVFSCSVMHEALHNHYTQKSLSLSPGKGSGSGHHHHHH |
| | | > F7B-IgG-Hole Flag HC SEQ ID NO: 194 |
| | | EVQLVESGGGLVQPGGSLRLSCAASGFNFSSSSIHWVRQAPGKGLEW |
| | | VAYIYPSYDYTYYADSVKGRFTISADTSKNTAYLQMNSLRAEDTAVYY |
| | | CARGYFYTWGGMDYWGQGTLVTVSSASTKGPSVFPLAPSSKSTSGGTA |
| | | ALGCLVKDYFPEPVTVSWNSGALTSGVHTFPAVLQSSGLYSLSSVVTVPS |
| | | SSLGTQTYICNVNHKPSNTKVDKKVEPKSCDKTHTCPPCPAPEAAGGPSV |
| | | FLFPPKPKDTLMISRTPEVTCVVVDVSHEDPEVKFNWYVDGVEVHNAKT |
| | | KPREEQYNSTYRVVSVLTVLHQDWLNGKEYKCKVSNKALGAPIEKTISK |
| | | AKGQPREPQVYTLPPSREEMTKNQVSLSCAVKGFYPSDIAVEWESNGQPE |
| | | NNYKTTPPVLDSDGSFFLVSKLTVDKSRWQQGNVFSCSVMHEALHNHYT |
| | | QKSLSLSPGKGSGSGDYKDDDDK |
| | | >F7B LC SEQ ID NO: 195 |
| | | DIQMTQSPSSLSASVGDRVTITCRASQSVSSAVAWYQQKPGKAPKLLI |
| | | YSASSLYSGVPSRFSGSRSGTDFTLTISSLQPEDFATYYCQQYYSLFTFG |
| | | QGTKVEIKRTVAAPSVFIFPPSDEQLKSGTASVVCLLNNFYPREAKVQWK |
| | | VDNALQSGNSQESVTEQDSKDSTYSLSSTLTLSKADYEKHKVYACEVTH |
| | | QGLSSPVTKSFNRGEC |
| N-HC | L6-N-HC | L6-N-HC appended ScFv-F2I-IgG-Knob-His HC SEQ ID NO: 196 |
| appended | appended | EVQLVESGGGLVQPGGSLRLSCAASGFTFTSYYISWVRQAPGKGLEW |
| ScFv-IgG- | ScFv-F2I- | VAEISPYSGSTYYADSVKGRFTISADTSKNTAYLQMNSLRAEDTAVYY |
| Knob-his + | IgG-Knob- | CALRARPPIRLHPRGSVMDYWGQGTLVTVSSGSAASGSSGGSSSGADIQ |
| IgG-Hole- | his + F2I- | MTQSPSSLSASVGDRVTITCRASQDVSTAVAWYQQKPGKAPKLLIYSA |
| Flag | IgG-Hole- | SFLYSGVPSRFSGSGSGTDFTLTISSLQPEDFATYYCQQSYTTPPTFGQ |
| | Flag | GTKVEIKGGGGSGGGGSGGGGSEVQLVESGGGLVQPGGSLRLSCAASG |
| | | FNIHSSSIHWVRQAPGKGLEWVAATYSSFGSITYADSVKGRFTISADTS |
| | | KNTAYLQMNSLRAEDTAVYYCARYHHPFGYALDYWGQGTLVTVSSA |
| | | STKGPSVFPLAPSSKSTSGGTAALGCLVKDYFPEPVTVSWNSGALTSGVH |
| | | TFPAVLQSSGLYSLSSVVTVPSSSLGTQTYICNVNHKPSNTKVDKKVEPKS |
| | | CDKTHTCPPCPAPEAAGGPSVFLFPPKPKDTLMISRTPEVTCVVVDVSHED |
| | | PEVKFNWYVDGVEVHNAKTKPREEQYNSTYRVVSVLTVLHQDWLNGKE |
| | | YKCKVSNKALGAPIEKTISKAKGQPREPQVYTLPPSREEMTKNQVSLWCL |
| | | VKGFYPSDIAVEWESNGQPENNYKTTPPVLDSDGSFFLYSKLTVDKSRWQ |
| | | QGNVFSCSVMHEALHNHYTQKSLSLSPGKGSGSGHHHHHH |
| | | > F2I-IgG-Hole Flag HC SEQ ID NO: 197 |
| | | EVQLVESGGGLVQPGGSLRLSCAASGFNIHSSSIHWVRQAPGKGLEW |
| | | VAATYSSFGSITYADSVKGRFTISADTSKNTAYLQMNSLRAEDTAVYY |
| | | CARYHHPFGYALDYWGQGTLVTVSSASTKGPSVFPLAPSSKSTSGGTA |
| | | ALGCLVKDYFPEPVTVSWNSGALTSGVHTFPAVLQSSGLYSLSSVVTVPS |
| | | SSLGTQTYICNVNHKPSNTKVDKKVEPKSCDKTHTCPPCPAPEAAGGPSV |
| | | FLFPPKPKDTLMISRTPEVTCVVVDVSHEDPEVKFNWYVDGVEVHNAKT |
| | | KPREEQYNSTYRVVSVLTVLHQDWLNGKEYKCKVSNKALGAPIEKTISK |
| | | AKGQPREPQVYTLPPSREEMTKNQVSLSCAVKGFYPSDIAVEWESNGQPE |
| | | NNYKTTPPVLDSDGSFFLVSKLTVDKSRWQQGNVFSCSVMHEALHNHYT |
| | | QKSLSLSPGKGSGSGDYKDDDDK |
| | | >F2ILC SEQ ID NO: 198 |
| | | DIQMTQSPSSLSASVGDRVTITCRASQSVSSAVAWYQQKPGKAPKLLI |
| | | YSASSLYSGVPSRFSGSRSGTDFTLTISSLQPEDFATYYCQQGVYLFTF |
| | | GQGTKVEIKRTVAAPSVFIFPPSDEQLKSGTASVVCLLNNFYPREAKVQW |
| | | KVDNALQSGNSQESVTEQDSKDSTYSLSSTLTLSKADYEKHKVYACEVT |
| | | HQGLSSPVTKSFNRGEC |

### Example 2

### Generation of WNT Super Agonist Molecules

[0227] To complement the set of surrogate agonists, generation of a set of potent antagonist molecules to study WNT signaling through specific FZDs was also attempted. Previous studies have shown that antibodies that compete with WNT binding to FZD can serve as antagonists (Gurney, et al., supra), however, this approach required the continuous presence of the antibodies at relatively high concentrations. Additionally, not all FZD binding antibodies generated functioned as antagonists, e.g., if they did not compete with WNT binding to receptor. Therefore, a potent and FZD selective antagonist platform would be highly desirable for both research and therapeutic development.

[0228] ZNRF3 and RNF43 are membrane-bound E3 ligases that target WNT receptors (FZDs and LRPs) for degradation (Hao et al. (2012) Nature 485:195-200; and Koo et al. (2012) Nature 488:665-669). Based on the activities of the E3 ligases, constructs were made to test if a fusion between FZD and E3 ligase binders would act as an antagonist of WNT signaling.

[0229] The E3 ligase binding activity of RSPO2 was utilized by fusing either a control GFP antibody or the FZD binding antibody, F12578, to a mutant RSPO2 fragment. The mutant RSPO2 fragment contained furin domains, Fu1Fu2, that harbor a double F105R/F109A mutation in the Fu2 domain (FIG. 2A, designated “RSPO2RA”). RSPO2RA fragment lost the ability to bind LGR (and therefore lost the WNT signal enhancing activity), but retained ability to bind E3 ligases (Xie et al. (2013) EMBO Rep. 14:1120-1126). Compared to wild type RSPO2Fu1Fu2-Fc fusion (Fc-RSPO2), the RSPO2RA mutant fusion to a negative control anti-GFP antibody had significantly diminished WNT signal enhancing activity. Only modest activities were observed at the highest dose tested (FIG. 2B). Surprisingly, while the fusion of the RSPO2RA mutant to F12578 (F12578-RSPO2RA) had no activity on its own, the fusion protein resulted in a biphasic curve in the presence of WNT3A, where at lower doses, it enhanced rather than inhibited WNT3A signaling (FIG. 2B). To understand the mechanism leading to the enhanced signaling, we performed FACS analysis to assess the FZD receptor levels on cell surface. As shown in FIG. 2C, cell treated with F12578-RSPO2RA showed increased FZD levels as detected by anti-FZD antibody. These results suggest that, instead of acting as an inhibitor to reduce FZD levels, F12578-RSPO2RA acted at least in part in a RSPO mimetic fashion, increased receptor levels and enhanced Wnt signaling.

[0230] To understand the general applicability of this observation, additional fusion proteins between RSPO2RA with other FZD binders, R2M3 (“F6”) which binds FZD1,2,7,5,8 and 1791 (“F7”) which binds FZD7, were generated. In these cases, the RSPO2RA was fused to the N-terminus of the FZD binding antibody heavy chain. As shown in FIG. 2D, both RSPO2RA-F6 and RSPO2-F7 also behaved in a RSPO mimetic fashion and enhanced WNT3A activities at low doses. A fusion of RSPO2RA to the N-terminus of F6 Fab on its heavy chain, RSPO2RA-F6_Fab, was also generated. As shown in FIG. 2E, the monovalent fusion protein also enhanced WNT3A activity. These results surprisingly suggested that, instead of acting as a suppressor to reduce FZD levels, FZD binder fusions to RSPO2RA, or generally E3 ligase binders, acted in a RSPO mimetic fashion and enhanced WNT signaling. Structure and sequence of these novel RSPO mimetic molecules are shown in Table 4.

[0231] Since this approach yielded the surprising result of enhancers instead of predicted antagonists, it was further investigated whether the surrogate molecules of FIG. 1, in particular the Fv-Ig structure, in combination with the E3 ligase binders would result in a WNT super agonist. To that end, trispecific, hexavalent molecules were generated as shown in FIG. 3A. As shown in FIG. 3B, this type of molecule possesses both WNT surrogate and RSPO activities as exemplified by the construct L6-F12578-RSPO2RA. This WNT super agonist activity translated to different FZD binders, e.g., L6-F127-RSPO2RA, L6-F58-RSPO2RA, L6-F4-RSPO2RA, L6-F49-RSPO2RA, L6-F10-RSPO2RA, L6-F7B-RSPO2RA, L6-F2I-RSPO2RA, L6-F4-2-RSPO2RA (FIG. 3C-3K). Additional formats where RSPO2RA was attached to different locations of the WNT mimetic molecule was also constructed as shown in FIG. 3J, with activities shown in 3K. Table 4 describes the different components/formats tested.

TABLE 4
WNT enhancers and WNT super agonist structures and sequences

| | | Sequences (as depicted in the accompanying |
|---|---|---|
| | | figures, WNT enhancer molecules and WNT super |
| | | agonist molecules typically comprises two of each |
| | | polypeptide sequence shown for any particular |
| Structure | Components | structure) |
| [chemical structure] | Fc-RSPO2 | SEQ ID NO: 32 DKTHTCPPCPAPEAAGGPSVFLFPPKPKDTLMISRTPEVTCV VVDVSHEDPEVKFNWYVDGVEVHNAKTKPREEQYNSTYRVVS VLTVLHQDWLNGKEYKCKVSNKALGAPIEKTISKAKGQPREP QVYTLPPSREEMTKNQVSLTCLVNKGFYPSDIAVEWESNGQPE NNYKTTPPVLDSDGSFFLYSKLTVDKSRWQQGNVFSCSVMHE |
| | | [chemical structure] |
| | | [chemical structure] |
| | | [chemical structure] |
| | | [chemical structure] |
| [chemical structure] | F12578- RSPO2RA | F12578 Light Chain SEQ ID NO: 22 DIELTQPPSVSVAPGQTARISCSGCNIGSFYVHWYQQKPGQA PVLVIYDKSNRPSGIPERFSGSNSGNTATLTISGTQAEDEAD YYCQSYANTLSLVFGGGTKLTVLGQPKAAPSVTLFPPSSEEL QANKATLVCLISDFYPGAVTVAWKADSSPVKAGVETTTPSKQ SNNKYAASSYLSLTPEQWKSHRSYSCQVTHEGSTVEKTVAPT ECS F12578-RSPO2RA Heavy Chain SEQ ID NO: 34 EVGLVESGGGLVQPGGGSLTLSCAASGFTFSHTLSWVRQAPG KGLEWVSVISGDGSYTYYADSVKGRFTISSDNSKNTLYLQMN |
| | | SLRAEDTAVYYCARNFIKYVFANWGQGTLVTVSSASTKGPSV |
| | | FPLAPSSKSTSGGTAALGCLVKDYFPEVTVSWNSGALTSGV |
| | | HTFPAVLQSSGLYSLSSVVTVPSSSLGTQTYICVNHKPSNT |
| | | KVDKKVEPKSCDKTHTCPPCPAPEAAGGPSVFLFPPKPKDTL |
| | | MISRTPEVTCVVVDVSHEDPEVKFNWYVDGVEVHNAKTKPRE |
| | | EQYNSTYRVVSVLTVLHQDWLNGKEYKCKVSNKALGAPIEKT |
| | | ISKAKGQPREPQVYTLPPSREEMTKNQVSLTCLVKGFYPSDI |
| | | AVEWESNGQPENNYKTTPPVLDSDGSFFLYSKLTVDKSRWQQ |
| | | GNVFSCSVMHEALHNHYTQKSLSLSPGKGGGGSGSGGSGGGG |
| | | [chemical structure] |
| | | [chemical structure] |
| | | [chemical structure] |
| [chemical structure] | αGFP- RSPO2RA | αGFP Light Chain SEQ ID NO: 35 DIELTQPPSVSVAPGQTARISCSGDNLGKKYVVWYQQKPGQA PVLVIYGDDERPSGIPERFSGSNSGNTATLTISGTQAEDEAD YYCASYDSSHILIVFGGGTKLTVLGQPKAAPSVTLFPPSSEE LQANKATLVCLISDFYPGAVTVAWKADSSPVKAGVETTTPSK QSNNKYAASSYLSLTPEQWKSHRESYSCQVTHEGSTVEKTVAP TECS αGFP Heavy Chain RSPO2RA SEQ ID NO: 36 QVQLVESGGGLVQPGGSLRLSCAASGFTFSRYGMHWVRQAPG KGLEWVSGISSIGSNTYYADSVKGRFTISRDNSKNTLYLQMN |
| | | SLRAEDTAVYYCARWYKTYIDVWGQGTLVTVSSASTKGPSVF |
| | | PLAPSSKSTSGGTAALGCLVKDYFPEPVTVSWNSGALTSGVH |
| | | TFPAVLQSSGLYSLSSVVTVPSSSLGTQTYICNVNHKPSNTK |
| | | VDKKVEPKSCDKTHTCPPCPAPEAAGGPSVFLFPPKPKDTLM |
| | | ISRTPEVTCVVVDVSHEDPEVKFNWYVDGVEVHNAKTKPREE |
| | | QYNSTKYRVVSVLTVLHQDWLNGKEYKCKVSNKALGAPIEKTI |
| | | SKAKGQPREPQVYTLPPSREEMTKNQVLTCLVKGFYPSIDA |
| | | VEWESNQPENNYKTTPPVLDSDGSFFLYSKLTVDKSRWQQG |
| | | NVFSCSVMHEALHNHYTQKSLSLSPGKGGGGSGSGGSGGGGS |
| | | [chemical structure] |
| | | [chemical structure] |
| | | [chemical structure] |
| [chemical structure] | RSPO2RA-F6 | F6 Light Chain SEQ ID NO: 37 QAVVLQEPSLSVSPGGTVTLTCGLSSGSVSTNYYPSWYQQTP GQAPRTLIYYTNTRSSDVPERFSGSIVGNKAALTITGAQPDD ESVYFCLLYLGRGIWVFGGGTKLTVLGQPKAAPSVTLFPPSS EELQANKATLVCLISDFYPGAVTVAWKADSSPVKAGVETTTP SKQSNNKYAASSYLSLTPEQWKSHRSYSCQVTHEGSTVEKTV APTECS RSPO2RA-F6 Heavy Chain SEQ ID NO: 38 |
| | | [chemical structure] |
| | | [chemical structure] |
| | | [chemical structure] |
| | | VQSGAEVKKPGASVKVSCKASGYTFTSYGISWVRQAPGQGLE |
| | | WMGWISAYNGNTNYAQKLQGRVTMTTDTSTSTAYMELRSLRS |
| | | DDTAVYYCASSKEKATYYYGMDVWGQGTTVTVSSASTKGPSV |
| | | FPLAPSSKSTSGGTAALGCLVKDYFPEPVTVSWNSGALTSGV |
| | | HTFPAVLSSGLYSLSSVVTVPSSSLGTQTYICNVNHKPSNT |
| | | KVDKKVEPKSCDKTHTCPPCPAPEAAGGPSVFLFPPKPKDTL |
| | | MISRTPEVTCVVVDVSHEDPEVKFNWYDGVEVHNAKTKPRE |
| | | EQYNSTYRVVSVLTVLHQDWLNGKEYKCKVSNKALGAPIEKT |
| | | ISKAKGQPREPQVYTLPPSREEMTKNWVSLTCLVKGFYPSDI |
| | | AVEWESNGQPENNYKTTPPVLDSDGSFFLYSKLTVDKSRWQQ |
| | | GNVFSCSVMHEALHNHYTQKSLSLSPGK |
| [chemical structure] | RSPO2RA-F7 | F7 Light Chain SEQ ID NO: 39 DIVMTQSPKSMSMSVGERVTLRCKASENVLNYVSWYQQKPEQ SPKLLIYGASNRYTGVPDRFTGSGSATDFTLTISSVQAEDLA DYHCGQSYRYPTFGAGTKLELKRTVAAPSVFIFPPSDEQLKS GTASVVCLLNNFYPREAKVQWKVDNALQSGNSQESVTEQDSK DSTYSLSSTLTLSKADYEKHKVYACEVTHQGLSSPVTKSFNR GEC RSPO2RA-F7 Heavy Chain SEQ ID NO: 40 |
| | | [chemical structure] |
| | | [chemical structure] |
| | | [chemical structure] |
| | | VESGGGLVQPKGSLKLSCAASGFTFNTYAMHWVRQAPGKGLE |
| | | WVARIRSKSNNYAKNYDDSVKDRFTISRDDSQSMLYLQMNNL |
| | | KTEDTAMYYCVRENYGGRFDYWGQGTTLTVSSASTKGPSVFP |
| | | LAPSSKSTSGGTAALGCLVKDYFPEPVTVSWNSGALTSGVHT |
| | | FPAVLQSSGLYSLSSVVTVPSSSLGTQTYICNVNHKPSNTKV |
| | | DKKVEPKSCDKTHTCPPCPAPEAAGGPSVFLFPPKPKDTLMI |
| | | SRTPEVTCVVVDVSHEDPEVKFNWYVDGVEVHNAKTKPREEQ |
| | | YNSTYRVVSVLTVLHQDWLNGKEYKCKVSNKALGAPIEKTIS |
| | | KAKGQPREPQVYTLPPSREEMTKNQVSLTCLVKGFYPSDIAV |
| | | EWESNGQPENNYKTTPPVLDSDGSFFLYSKLTVDKSRWQQGN |
| | | VFSCSVMHEALHNHYTQKSLSLSPGK |
| [chemical structure] | RSPO2RA- αGFP | αGFP Light Chain SEQ ID NO: 35 DIELTQPPSVSVAPGQTAISCSGDNLGKKYVYWYQQKPGQAPV LVIYGDDERPSGIPERFSGSNSGNTATLTISGTQAEDEADYYCA SYDSSHILIVFGGGTKLTVLGQPKAAPSVTLFPPSSEELQANKA TLVCLISDFYPGAVTVAWKADSSPVKAGVETTTPSKQSNNKYAA SSYLSLTPEQWKSHRSYSCQVTHEGSTVEKTVAPTECS RSPO2RA-αGFP Heave Chain SEQ ID NO: 41 [chemical structure] |
| | | [chemical structure] |
| | | [chemical structure] |
| | | LVQPGGSLRLSCAASGFTFSRYGMHWVRQAPGKGLEWVSGISSI |
| | | GSNTYYADSVKGRFTISRDNSKNTLYLQUMNSLRAEDTAVYYCAR |
| | | WYKTYIDVWGQGTLVTVSSASTKGPSVFPLAPCSRSTSESTAA |
| | | GCLVKDYFPEPVTVSWNSGALTSGVHTFPAVLQSSGLYSLSSVV |
| | | TVPSSNFGTQTYTCNVDHKPSNTKVDKTVERKCCVECPPCPAPP |
| | | VAGPSVFLFPPKPKDTLMISRTPEVTCVVVDVSHEDPEVQFNWY |
| | | VDGVEVHNAKTKPREEQFNSTFRVVSVLTVVHQDWLNGKEYKCK |
| | | VSNKGLPAPIEKTISKTKGQPREPQVYTLPPSREEMTKNQVSLT |
| | | CLVKGFYPSDIAVEWESNGQPENNYKTTPPMLDSDGSFFLYSKL |
| | | TVDKSRWQQGNVFSCSVMHEALHNHYTQKSLSLSPGK |
| [chemical structure] | RSPO2RA-F6 Fab | F6 Light Chain SEQ ID NO: 37 QAVVLQEPSLSVSPGGTVTLTCGLSSGSVSTNYYPSWYQQTPGQ APRTLIYYTNTRSSDVPERFSGSIVGNKAALTITGAQPDDESVY FCLLYLGRGIWVFGGGTKLTVLGQPKAAPSVTLFPPSSEELQAN KATLVCLISDFYPGAVTVAWKADSSPVKAGVETTTPSKQSNNKY |
| | | AASSYLSLTPEQWKSHRSYSCQVTHEGSTVEKTVAPTECS |
| | | RSPO2RA-F6-VH-CH1 SEQ ID NO: 42 |
| | | [chemical structure] |
| | | [chemical structure] |
| | | [chemical structure] |
| | | VKKPGASVKVSCKASGYTFTSYGISWVRQAPGQGLEWMGWISAY |
| | | NGNTNYAQKLQGRVTMTTDTSTSTAYMELRSLRSDDTAVYYCAS |
| | | SKEKATYYYGMDVWGQGTTVTVSSASTKGPSVFPLAPSSKSTSG |
| | | GTAALGCLVKDYFPEPVTVSWNSGALTSGVHTFPAVLQSSGLYS |
| | | LSSVVTVPSSSLGTQTYICNVNHKPSNTKVDKKVEPKSCGSGSG |
| | | HHHHHH |
| [chemical structure] | L6-F12578- RSPO2RA | L6-F12578 Light Chain SEQ ID NO: 20 DIQMTQSPSSLSASVGDRVTITCRASQDVSTAVAWYQQKPGKA PKLLIYSASFLYSGVPSRFSGSGSGTDFTLTISSLQPEDFATY YCQQSYTTPPTFGQGTKVEIKGGGGSGGGGSGGGGSDIELTQP PSVSVAPGQTARISCSGDNIGSFYVHWYQQKPGQAPVLVIYDK SNRPSGIPERFSGSNSGNTATLTISGTQAEDEADYYCQSYANT LSLVFGGGTKLTVLGQPKAAPSVTLFPPSSEELQANKATLVCL ISDFYPGAVTVAWKADSSPVKAGVETTTPSKQSNNKYAASSYL SLTPEQWKSHRSYSCQVTHEGSTVEKTVAPTECS L6-F12478-RSPO2RA heavy Chain SEQ ID NO: 48 EVQLVESGGGLVQPGGSLRLSCAASGFTFTSYYISWVRQAPGK |
| | | GLEWVAEISPYSGSTYYADSVKGRFTISADTSKNTAYLQMNSL |
| | | RAEDTAVYYCALRARPPIRLHPRGSVMDYWGQGTLVTVSSGGG |
| | | GSGGGGSGGGGSEVQLVESGGGLVQPGGSLRLSCAASGFTFSH |
| | | YTLSWVRQAPGKGLEWVSVISGDGSYTYYADSVKGRFTISSDN |
| | | SKNTLYLQMNSLRAEDTAVYYCARFIKYVFANWGQGTLVTVS |
| | | SASTKGPSVFPLAPSSKSTSGGTAALGCLVKDYFPEPVTVSWN |
| | | SGALTSGVHTFPAVLQSSGLYSLSSVVTVPSSSLGTQTYICNV |
| | | NHKPSNTKVDKKVEPKSCDKTHTCPPCPAPEAAGGPSVFLFPP |
| | | KPKDTLMISRTPEVTCVVVDVSHEDPEVKFNWYVDGVEVHNAK |
| | | TKPREEQYNSTYRVVSVLTVLHQDWLNGKEYKCKVSNKALGAP |
| | | IEKTISKAKGQPREPQVYTLPPSREEMTKNQVSLTCLVKGFYP |
| | | SDIAVEWESNGQPENNYKTTPPVLDSDGSFFLYSKLTVDKSRW |
| | | QQGNVFSCSVMHEALHNHYTQKSLSLSPGKGGGGSGSGGSGGG |
| | | [chemical structure] |
| | | [chemical structure] |
| | | [chemical structure] |
| [chemical structure] | F127-RSPO2RA | F127 Light Chain SEQ ID NO: 49 DIQMTQSPSSLSASVGDRVTITCRASQSVSSAVAWYQQ KPGKAPKLLIYSASSLYSGVPSRFSGSRSGTDFTLTISSL QPEDFATYYCQQYWYGVAPITFGQGTKVEIKRTVAAP SVFIFPPSDEQLKSGTASVVCLLNNFYPREAKVQWKVDNA LQSGNSQESVTEQDSKDSTYSLSSTLTLSKADYEKHKVYA CEVTHQGLSSPVTKSFNRGEC F127-RSPO2RA Heavy Chain SEQ ID NO: 50 EVQLVESGGGLVQPGGSLTLSCAASGFNISSSYIHWVR QAPGKGLEWVAYIYSSYGSTYYADSVKGRFTISADTSK |
| | | NTAYLQMNSLRAEDTAVYYCARASWYALDYWGQGTL |
| | | VTVSSASTKGPSASTKGPSVFPLAPSSKSTSGGTAALGCLV |
| | | KDYFPEPVTVSWNSGALTSGVHTFPAVLQSSGLYSLSSVV |
| | | TVPSSSLGTQTYICNVNHKPSNTKVDKKVEPKSCDKTHTC |
| | | PPCPAPEAAGGPSVFLFPPKPKDTLMISRTPEVTCVVVDVS |
| | | HEDPEVKFNWYVDGVEVHNAKTKPREEQYNSTYRVVSV |
| | | LTVLHQDWLNGKEYKCKVSNKALGAPIEKTISKAKGQPR |
| | | EPQVYTLPPSREEMTKNQVSLTCLVKGFYPSDIAVEWESN |
| | | GQPENNYKTTPPVLDSDGSFFYSKLTVDKSRWQQGNVF |
| | | SCSVMHEALHNHYTQKSLSLSPGKGGGGSGSGGSGGGGS |
| | | [chemical structure] |
| | | [chemical structure] |
| | | [chemical structure] |
| [chemical structure] | L6-F127- RSPO2RA | L6-F127 Light Chain SEQ ID NO: 25 DIQMTQSPSSLSASVGDRVTITCRASQDVSTAVAWYGGKPGKA PKLLIYSASFLYSGVPSRFSGSGSGTDFTLTISSLQPEDFATY YCQQSYTTPPTFGQGTKVEIKGGGGSGGGGSGGGGSDIQMTQS PSSLSASVGDRVTITCRASQSVSSAVAWYGGKPGKAPKLLIYS ASSLYSGVPSRFSGSRSGTDFTLTISSLQPEDFATYYCQQYWY GVAPITFGQGTKVEIKRTVAAPSVFIFPPSDEQLKSGTASVVC LLNNFYPREAKVQWKVDNALQSGNSQESVTEQDSKDSTYSLSS TLTLSKADYEKHKVYACEVTHQGLSSPVTKSFNRGEC L6-F127-RSPO2RA Heavy Chain DEQ ID NO: 51 |
| | | EVQLVESGGGLVQPGGSLRLSCAASGFTFTSYYISWVRQAPGK |
| | | GLEWVAEISPYSGSTYYADSVKGRFTISADTSKNTAYLQMNSL |
| | | RAEDTAVYYCALRARPPIRLHPRGSVMDYWGQGTLVTVSSGGG |
| | | GSGGGGSGGGGSEVQLVESGGGLVQPGGSLRLSCAASGFNISS |
| | | SYIHWRVQAPGKGLEWVAYIYSSYGSTYYADSVKGRFTISADT |
| | | SKNTAYLQMNSLRAEDTAVYYCARASWYALDYWGQGTLVTVSS |
| | | ASTKGPSVFPLAPSSKSTSGGTAALGCLVKDYFPEPVTVSWNS |
| | | GALTSGVHTFPAVLQSSGLYSLSSVVTVPSSSLGTQTYICNVN |
| | | HKPSNTKVDKKVEPKSCDKTHTCPPCPAPEAAGGPSVFLFPPK |
| | | PKDTLMISRTPEVTCVVVDVSHEDPEVFKFNWYDGVEVHNAKT |
| | | KPREEQYNSTYRVVSVLTVLHQDWLNGKEYKCKVSNKALGAPI |
| | | EKTISKAKGQPREPQVYTLPPSREEMTKNQVSLTCLVKGFYPS |
| | | DIAVEWESNGQPENNYKTTPPVLDSDGSFFLYSKLTVDSRWQ |
| | | QGNVFSCSVMHEALHNHYTQKSLSLSLSPGKGGGGSGSGGSGGGG |
| | | [chemical structure] |
| | | [chemical structure] |
| | | [chemical structure] |
| [chemical structure] | F58-RSPO2RA | F58 Light Chain SEQ ID NO: 52 DIQMTQSPSSLSASVGDRVTITCRASQSVSSAVAWYQQKPGKA PKLLIYSASSLYSGVPSRFSGSRSGTDFTLTISSLQPEDFATY YCQQWYSSGHVLITFGQGTKVEIKRTVAAPSVFIFPPSDEQLK SGTASVVCLLNNFYPREAKVQWKVDNALQSGNSQESVTEQDSK DSTYSLSSTLTLSKADYEKHKVYACEVTHQGLSSPVTKSFNRG EC F8-RSPO2RA Heavy Chain SEQ ID NO: 53 EVQLESGGGLVQPGGSLRLSCAASGFNISYSIHVWVRQAPGK GLEWVASIYSSSGSTSYADSVKGRFTISADTSKNTAYLQMNSL |
| | | RAEDTAVYYCARGAIDYWGQGTLVTVSSASTKGPSVFPLAPSS |
| | | KSTSGGTAALGCLVKDYFPEPVTVSWNSGALTSGVHTFPAVLQ |
| | | SSGLYSLSSVVTVPSSSLGTQTYICNVNHKPSNTKVDKKVEPK |
| | | SCDKTHTCPPCPAPEAAGGSVFLFPPKPKDTLMISRTPEVTC |
| | | VVVDVSHEDPEVKFNWYVDGVEVHNAKTKPREEQYNSTYRVVS |
| | | VLTVLHQDWLNGKEYKCKVSNKALGAPIEKTISKAKGQPREPQ |
| | | VYTLPPSREEMTKNQVSLTCLVKGFYPSDIAVEWESNGQPENN |
| | | YKTTPPVLDSDGSFFLYSKLTVDKSRWQQGNVFSCSVMHEALH |
| | | [chemical structure] |
| | | [chemical structure] |
| | | [chemical structure] |
| | | [chemical structure] |
| [chemical structure] | L6-F58- RSPO2RA | L6-F58 Light Chain SEQ ID NO: 27 DIQMTQSPSSLSASVGDRVTITCRASQDVSTAVAWYQQKPGKA PKLLIYSASFLYSGVPSRFSGSGSGTDFTLTISSLQPEDFATY YCQQSYTTPPTFGQGTKVEIKGGGGSGGGGSGGGGSDIQMTQS PSSLSASVGDRVTITCRASQSVSSAVAWYQQKPGKAPKLLIYS ASSLYSGVPSRFSGSRSGTDFTLTISSLQPEDFATYYCQQWYS SGHVLITFGQGTKVEIKRTVAAPSVFIFPPSDEQLKSGTASVV CLLNNFYPREAKVQWKVDNALQSGNSQESVTEQDSKDSTYSLS STLTLSKADYEKHHVYACEVTHQGLSSPVTKSFVRGEC L6-58_RSPO2RA Heavy Chain SEQ ID NO: 54 EVQLVESGGGLVQPGGSLRLSCAASGFTFTSYYISWVRQAPGK |
| | | GLEWVAEISPYSGSTYYADSVKGRFTISADTSKNTAYLQMNSL |
| | | RAEDTAVYYCALRARPPIRLHPRGSVMDYWGQGTLVTVSSGGG |
| | | GSGGGGSGGGGSEVQLESGGGLVQPGGSLRLSCAASGFNISY |
| | | SYIHWVRQAPGKGLEWVASIYSSSGSTSYADSVKGRFTISADT |
| | | SKNTAYLQMNSLRAEDTAVYYCARGAIDYWGQGTLVTVSSAST |
| | | KGPSVFPLAPSSKSTSGGTAALGCLVKDYFPEPVTVSWNSGAL |
| | | TSGVHTFPAVLQSSGLYSLSSVVTVPSSSLGTQTYICNVNHKP |
| | | SNTKVDKKVEPKSCDKTHTCPPCPAPEAAGGPSVFLFPPKPKD |
| | | TLMISRTPEVTCVVVDVSHEDPEVKFNWYVDGVEVHNAKTKPR |
| | | EEQYNSTYRVVSVLTVLHQDWLNGKEYKCKVSNKALGAPIEKT |
| | | ISKAKGQPREPQVYTLPPSREEMTKNQVSLTCLVKGFYPSDIA |
| | | VEWESNGQPENNYKTTPPVLDSDGSFFLYSKLTVDKSRWGGGN |
| | | [chemical structure] |
| | | [chemical structure] |
| | | [chemical structure] |
| | | [chemical structure] |
| [chemical structure] | L2-F6- RSPO2RA | L2-F6 Light Chain SEQ ID: NO: 43 [chemical structure] [chemical structure] [chemical structure] QEPSLSVSPGGTVTLTCGLSSGSVSTNYYPSWYQQTPGQAPRT LIYYTNTRSSDVPERFSGSIVGNKAALTITCAQPDDESVYFCL LYLGRGIWVFGGGTKLTVLGQPKAAPSVTLFPPSSEELQANKA TLVCLISDFYPGAVTVAWKADSSPVKAGVETTTPSKQSNNKYA ASSYLSLTPEQWKSHRSYSCQVTHEGSTVEKTVAPTECS |
| | | F6-RSPO2RA Heavy Chain SEQ ID: NO: 44 |
| | | EVQLVQSGAEVKKPGASVKVSCKASGYTFTSYGISWVRQAPGQ |
| | | GLEWMGWISAYNGNTNYAQKLQGRVTMTTDTSTSTAYMELRSL |
| | | RSDDTAVYYCASSKEKATYYYGMDVWGQGTTVTVSSASTKGPS |
| | | VFPLAPSSKSTSGGTAALGCLVKDYFPEPVTVSWNSGALTSGV |
| | | HTFPAVLQSSGLYSLSSVVTVPSSSLGTQTYICNVNHKPSNTK |
| | | VDKKVEPKSCDKTHTCPPCPAPEAAGGPSVFLFPPKPKDTLMI |
| | | SRTPEVTCVVVDVSHEDPEVKFNWYVDGVEVHNAKTKPREEQY |
| | | NSTYRVVSVLTVLHQDWLNGKEYKCKVSNKALGAPIEKTISKA |
| | | KGQPREPQVYTLPPSREEMTKNQVSLTCLVKGFYPSDIAVEWE |
| | | SNGQPENNYKTTPPVLDSDGSFFLYSKLTVDKSRWQQGNVFSC |
| | | [chemical structure] |
| | | [chemical structure] |
| | | [chemical structure] |
| | | [chemical structure] |
| [chemical structure] | F6-RSPO2RA | F6 Light Chain SEQ ID NO: 37 QAVVLQEPSLSVSPGGTVTLTCGLSSGSVSTNYYPSWYQQTPG QAPRTLIYYTNTRSSDVPERFSGSIVGNKAALTITGAQPDDES VYFCLLYLGRGIWVFGGGTKLTVLGQPKAAPSVTLFPPSSEEL QANKATLVCLISDFYPGAVTVAWKADSSPVKAGVETTTPSKQS NNKYAASSYLSLTPEQWKSHRSYSCQVTHEGSTVEKTVAPTEC S F6-RSPO2RA Heavy Chain SEQ ID NO: 44 EVQLVQSGAEVKKPGASVKVSCKASGYTFTSYGISWVRQAPGQ |
| | | GLEWMGMISAYNGNTNYAQKLQGRVTMTTDTSTSTAYMELREL |
| | | RSDDTAVYYCASSKEKATYYYGMDVWGQGTTVTVSSASTKGPS |
| | | VFPLAPSSKSTSGGTAALGCLVKDYFPEPVTVSWNSGALTSGV |
| | | HTFPAVLQSSGLYSLSSVVTVPSSSLGTQTYICNVNHKPSNTK |
| | | VDKKVEPKSCDKTHTCPPCPAPEAAGGPSVFLFPPKPKDTLMI |
| | | SRTPEVTCVVVDVSHEDPEVKFNWYVDGVEVHNAKTKPREEQY |
| | | NSTYRVVSVLTVLHQWLNGKEYKCKVSNKALGAPIEKTISKA |
| | | KGQPREQVYTLPPSREEMTKNQSLTCLVKGFYPSIAVEWE |
| | | SNQPENNYKTTPPVLDSDGSFFLYSKLTVDKSRWQQGNVFSC |
| | | [chemical structure] |
| | | [chemical structure] |
| | | [chemical structure] |
| | | [chemical structure] |
| [chemical structure] | L2-F6- RSPO2R@ CL | L2-F6-FSPO2RA Light Chain SEQ ID NO: 45 [chemical structure] [chemical structure] [chemical structure] [chemical structure] SSGSVSTNYYPSWYQQTPGQAPRTLIYYTNTRSSDVP |
| | | ERFSGSIVGNKAALTITGAQPDDESVYFCLLYLGRGI |
| | | WVFGGGTKVTVLGQPKAAPSVTLFPPSSEELQANKAT |
| | | LVCLISDFYPGAVTVAWKADSSPVKKAGVETTTPSKQS |
| | | NNKYAASSYLSLTPEQWKSHRSYSCQVTHESGSTVEKT |
| | | [chemical structure] |
| | | [chemical structure] |
| | | [chemical structure] |
| | | [chemical structure] |
| | | CLVKDYFPEPVTVSWNSGALTSGVHTFPAVLQSSGLY |
| | | SLSSVVTVPSSSLGTQTYICNVNHKPSNTKVDKKVEP |
| | | KSCDKTHTCPPCPAPEAAGGPSVFLFPPKPKDTLMIS |
| | | RTPEVTCVVVDVSHEDPEKFNWYVDGVEVHNAKTKP |
| | | REEQYNSTYRVVSVLTVLHQDWLNGKEYKCKVSNKAL |
| | | GAPIEKTISKAKGQPREPQVYTLPPSREEMTKNQVSL |
| | | TCLVKGFYPSDIAVEWESNGQPENNYKTTPPVLDSDG |
| | | SFFLYSKLTVDKSRWQQGNFSCSVMHEALHNHYTQK |
| | | SLSLSPGK |
| [chemical structure] | F6- RSO2RA@ CL | F6-RSPO2RA Light Chain SEQ ID NO: 47 QAVVLQEPSLSVSPGGTVTLTCGLSSGSVSTNYYPSW YQQTPGQAPRTLIYYTNTRSSDVPERFSGSIVGNKAA LTITGAQPDDESVYFCLLYLGRGIWVFGGGTKLTVLG QPKAAPSVTLFPPSSEELQANKATLVCLISDFYGAV TVAWKADSSPVKAGVETTTPSKQSNNKYAASSYLSLT PEQWKSHRSYSCQVTHEGSTVEKTVAPTECSGGGGSG |
| | | [chemical structure] |
| | | [chemical structure] |
| | | [chemical structure] |
| | | [chemical structure] |
| | | F6 Heavy Chain SEQ ID NO: 46 |
| | | EVQLVQSGAEVKKPGASVKVSCKASGYTTSGISWV |
| | | RQAPGQGLEWMGWISAYNGNTNYAQKLQGRVTMTTDT |
| | | STSTAYMELRSLRSDDTAVYYCASSKEKATYYYGMDV |
| | | WGQGTTVTVSSASTKGPSVFPLAPSSKSTSGGTAALG |
| | | CLVKDYFPEPVTVSWNSGALTSGVHTFPAVLQSSGLY |
| | | SLSSVVTVPSSSLGTQTYICNVNHKPSNTKVDKKVEP |
| | | KSCDTHTCPPCPAPEAAGGPSVFLFPPKPKDTIMIS |
| | | RTPEVTCVVVDVSHEDPEVKFNWYVDGVEVHNAKTKP |
| | | REEQYNSTYRVVSVLTVLHQDWLNGKEYKCKVSNKAL |
| | | GAPIEKTISKAKGQPREPQVYTLPPSREEMTKNQVSL |
| | | TCLVKGFYPSDIAVEWESNGQPENNYKTTPPVLDSDG |
| | | SFFLYSKLTVDKSRWQQGNVFSCSVMHEALHNHYTQK |
| | | SLSLSPGK |
| | F4-2- | R4-2_LC SEQ ID NO: 98 |
| | RSPO2RA | DIQMTQSPSSLSASVGDRVTITCRASQSVSSAV |
| | | AWYQQKPGKAPKLLIYSASSLYSGVPSRFSGS |
| | | RSGTDFTLTISSLQPEDFATYYCQQSYAAYLFT |
| | | FGQGTKVEIKRTVAAPSVFIFPPSDEQLKSGTAS |
| | | VVCLLNNFYPREAKVQWKVDNALQSQNSQESV |
| | | TEQDSKDSTYSLSSTLTLSKADYEKHKVYACEVT |
| | | HQGLSSVTKSFNRGEC |
| | | >F4-2_RSPO2RA_HC SEQ ID NO: 99 |
| | | EVQLVESGGGLVQPGGSLRTSCAASGFNISYY |
| | | YIHWVRQAPGKGLEWVASIYPSSGYTYYADSV |
| | | KGRFTISADTSKNTAYLQMNSLRAEDTAVYYC |
| | | ARSSFYWAMDYWGQGTLVTVSSASTKGPSVFP |
| | | LAPSSKSTSGGTAALGCLVKDYFPEPVTVSWNSG |
| | | ALTSGVHTFPAVLQSSGLYSLSSVVTVPSSSGTQ |
| | | TYICNVNHKPSNTKVDKKVEPKSCDKTHTCPPCP |
| | | APEAAGGPSVFLPPKPKDTLMISRTPEVTCVVV |
| | | DVSHEDPEVKFNWYBDVEVHNAKTKREEQY |
| | | NSTYRVVSVLTVLHQDWLNGKEYKCKVSNKAL |
| | | GAPIEKTISKAKGQPREPQVYTLPPSEEMTKNQ |
| | | VSLTCLVKGFYPSDIAVEWESNGQPENNYKTTPP |
| | | VLDSDGFFLYSKLTVDKSRWQQGNVFSCSVMH |
| | | EALHNHYTQKSLSLSPGKGGGGSGSGGSGGGGS |
| | | [chemical structure] |
| | | [chemical structure] |
| | | [chemical structure] |
| | | [chemical structure] |
| | F10- | F10_LC SEQ ID NO: 100 |
| | RSPO2RA | ELTQPPSVSVSPGQTARITCSGDGSYAGSYYYG |
| | | WYQQKPGQAPVTLIYNNKRPSGIPERFSGSL |
| | | SGSTNTLTISGVQAEDEADYYCGSADNSGAAF |
| | | GGGTKLTVLRTVAAPSVFIFPPSDEQLKSGTASV |
| | | VCLLNNFYPREAKVQWKVDNALQSGNSQESVTE |
| | | QDKDSTYSLSSTLTLSKADYEKHKVYACEVTH |
| | | QGLSSPVTKSFNRGEC |
| | | >F10_RSPO2RA_HC SEQ ID NO: 101 |
| | | EVQLVESGGGLVQPGGSLRLSCAASGFTFSSF |
| | | NMFWVRQAPGKGLEWVAGIDDDGSYPNYGS |
| | | AVKGRATISRDNSKNTLYLQMNSLRAEDTAVY |
| | | YCAKSGYGGSWGGYIADDIDAWGQGTLVTVS |
| | | SASTKGPSVFPLAPSSKSTSGGTAALGCLVKDYF |
| | | PEPVTVSWNSGALTSGVHTFPAVLQSSGLYSLSS |
| | | VVTVPSSSLGTQTYICNVNHKPSNTKVDKKVEPK |
| | | SCDKTHTCPPCPAPEAAGGPSVFLFPPKPKDTLMI |
| | | SRTPEVTCVVVDVSHEDPEVKFNWYVDGVEVH |
| | | NAKTKPREEQYNSTYRVVSVLTVLHQDWLNGK |
| | | EYKCKVSNKALGAPIEKTISKAKGQPREPQVYTL |
| | | PPSREEMTKNQVSLTCLVKGFYPSDIAVEWESNG |
| | | QPENNYKTTPPVLDSDGSFFLYSKLTVDKSRWQ |
| | | QGNVSCSYMHEALHNHYTQKSLSLSPGKGGGG |
| | | [chemical structure] |
| | | [chemical structure] |
| | | [chemical structure] |
| | anti-GFP- | anti-GFP_LC SEQ ID NO NO: 102 |
| | RSPO2RA | DIELTQPPSVSVAPGQTARISCSGDNLGKKYVY |
| | | WYQQKPGQAPVLVIYGDDERPSGIPERFSGSN |
| | | SGNTATLTISGTQAEDEADYYCASYDSSHILIV |
| | | FGGGTKLTVLGQPKAAPSVTLFPPSSEELQANK |
| | | ATLVCLISDFYPGAVTVAWKADSSPVKAGVETT |
| | | TPSKQSNNKYAASSYLSLTPEQWKSHRSYSCQVT |
| | | HEGSTVEKTVAPTECS |
| | | >anti-GFP_RSPO2RA_HC SEQ ID NO: 103 |
| | | QVQLVESGGGLVQPGGSLRLSCAASGFTFSRY |
| | | GMHWVRQAPGKGLEWVSGISSIGSNTYYADS |
| | | VKGRFTISRDNSKNTLYLQMNSLRAEDTAVYY |
| | | CARWYKTYIDVWGQGTLVTVSSASTKGPSVFP |
| | | LAPSSKSTSGGTAALGCLVKDYFPEPVTVSWNSG |
| | | ALTSGVHTFPAVLQSSGLYSLSSVVTVPSSSLGTQ |
| | | TYICNVNHKPSNTKVDKKVEPKSCDKTHTCPPCP |
| | | APEAAGGPSVFLFPPKPKDTLMISRTPEVTCVVV |
| | | DVSHEDPEVKFNWYVDGVEVHNAKTKPREEQY |
| | | NSTYRVVSVLTVLHQDWLNGKEYKCKVSNKAL |
| | | GAPIEKTISKAKGQPREPQVYTLPPSREEMTKNQ |
| | | VSLTCLVKGFYPSDIAVEWESNGQPENNYKTTPP |
| | | VLDSDGSFFLYSKLTVDKSRWQQGNVFSCVMH |
| | | EALHNHYTQKSLSLSPGKGGGGSGSGGSGGGGS |
| | | [chemical structure] |
| | | [chemical structure] |
| | | [chemical structure] |
| | | [chemical structure] |
| Fv-IgG | L6-F2-2- | L6-F4-2-RSPO2RA_HC SEQ ID NO: 103 |
| | RSPO2RA | EVQLVESGGGLVQPGGSLRLSCAASGFTFTSY |
| | | YISWVRQAPGKGLEWVAEISPYSGSTYYADSV |
| | | KGRFTISADTSKNTAYLQMNSLRAEDTAVYYC |
| | | ALRARPPIRLHPRGSVMDYWGQGTLVTVSSG |
| | | GGGSGGGGSGGGGSEVQLVESGGGLVQPGGSL |
| | | RLSCAASGFNISYYYIHWVRQAPGKGLEWVAS |
| | | IYPSSGYTYYADSVKGRFTISADTSKNTAYLQM |
| | | NSLRAEDTAVYYCARSSFYWAMDYWGQGTL |
| | | VTVSSASTKGPSVFPLAPSSKSTSGGTAALGCLV |
| | | KDYFPEPVTVSWNSGALTSGVHTFPAVLQSSGLY |
| | | SLSSVVTVPSSSLGTQTYICNVNHKPSNTKVDKK |
| | | VEPKSCDKTHTCPPCPAPEAAGGPSVFLFPPKPK |
| | | DTLMISRTPEVTCVVVDVSHEDPEVKFNWYVDG |
| | | VEVHNAKTKPREEQYNSTYRVVSVLTVLHQDW |
| | | LNGKEYKCKVSNKALGAPIEKTISKAKGQPREPQ |
| | | VYTLPPSREEMTKNQVSLTCLVKGFYPSDIAVEW |
| | | ESNGQPENNYKTTPPVLDSDGSFFLYSKLTVDKS |
| | | RWQQGNVFSCSVMHEALHNHYTQKSLSLSPGK |
| | | [chemical structure] |
| | | [chemical structure] |
| | | [chemical structure] |
| | | [chemical structure] |
| | | >L6-F4-2_LC SEQ ID NO: 104 |
| | | DIQMTQSPSSLSASVGDRVTITCRASQDVSTAV |
| | | AWYQQKPGKAPKLLIYSASFLYSGVPSRFSGS |
| | | GSGTDFTLTISSLQPEDFATYYCQQSYTTPPTF |
| | | GQGTYKVEIKGGGGSGGGGSGGGGSDIQMTQSP |
| | | SSLSASVGDRVTITCRASQSVSSAVAWYQQKP |
| | | GKAPKLLIYSASSLYSGVPSRFSGSRSGTDFTL |
| | | TISSLQPEDFATYYCQQSYAAYLFTFGQGTKV |
| | | EIKRTVAAPSVFIFPPSDEQLKSGTASVVCLLNNF |
| | | YPREAKVQWKVDNALQSGNSQESVTEQDSKDST |
| | | YSLSSTLTLSKADYEKHKVYACEVTHQGLSSPVT |
| | | KSFNRGEC |
| Fv-IgG | L6-F10- | L6-F10-RSPO2RA_HC SEQ ID NO: 105 |
| | RSPO2RA | EVQLVESGGGLVQPGGSLRLSCAASGFTFTSY |
| | | YISWVRQAPGKGLEWVAEISPYSGSTYYADSV |
| | | KGRFTISADTSKNTAYLQMNSLRAEDTAVYYC |
| | | ALRARPPIRLHPRGSVMDYWGQGTLVTVSSG |
| | | GGGSGGGGSGGGGSEVQLVESGGGLVQPGGSL |
| | | RLSCAASGFTFSSFNMFWVRQAPGKGLEWVA |
| | | GIDDDGSYPNYGSAVKGRATISRDNSKNTLYL |
| | | QMNSLRAEDTAVYYCAKSGYGGSWGGYIADD |
| | | IDAWGQGTLVTVSSASTKGPSVFPLAPSSKSTSG |
| | | GTAALGCLVKDYFPEPVTVSWNSGALTSGVHTF |
| | | PAVLQSSGLYSLSSVVTVPSSSLGTQTYICNVNH |
| | | KPSNTKVDKKVEPKSCDEKTHTCPPCPAPEAAGGP |
| | | SVFLFPPKPKDTLMISRTPEVTCVVVDVSHEDPE |
| | | VKFNWYVDGVEVHNAKTKPREEQYNSTYRVVS |
| | | VLTVLHQDWLNGKEYKCKVSNKALGAPIEKTIS |
| | | KAKGQPREPQVYTLPPSREEMTKNQVSLTCLVK |
| | | GFYPSDIAVEWESNGQPENNYKTTPPVLDSDGSF |
| | | FLYSKLTVDKSRWQQGNVFSCSBMHEALHNHY |
| | | [chemical structure] |
| | | [chemical structure] |
| | | [chemical structure] |
| | | [chemical structure] |
| | | >L6-F10_LC SEQ ID NO: 106 |
| | | DIQMTQSPSSLSASVGDRVTITCRASQDVSTAV |
| | | AWYQQKPGKAPKLLIYSASFLYSGVPSRFSGS |
| | | GSGTDFTLTISSLQPEDFATYYCQQSYTTPPTF |
| | | GQGTKVEIKGGGGSGGGGSGGGGSELTQPPSVS |
| | | VSPGQTARITCSGDGSYAGSYYYGWYQQKPG |
| | | QAPVTLIYYNNKRPSGIPERFSGSLSGSTNTLTI |
| | | SGVQAEDEADYYCGSADNSGAAFGGGTKLTV |
| | | LRTVAAPSVFIFPPSDEQLKSGTASVVCLLNNFYP |
| | | REAKVQWKVDNALQSGNSQESVTEQDSKDSTYS |
| | | LSSTLTLSKADYEKHKVYACEVTHQGLSSPVTKS |
| | | FNRGEC |
| (F4)Fv-IvG | L6-F4- | L6-F4-RSPO2RA HC SEQ ID NO: 107 |
| | RSPO2RA | EVQLVESGGGLVQPGGSLRLSCAASGFTFTSYYISWV |
| | | RQAPGKGLEWVAEISPYSGSTYYADSVKGRFTISADT |
| | | SKNTAYLQMNSLRAEDTAVYYCALRARPPIRLHPRGS |
| | | VMDYWGQGTLVTVSSGGGGSGGGGSGGGGSEVQLVES |
| | | GGGLVQPGGSLRLSCAASGFNLSSYSMHWVRQAPGKG |
| | | LEWVAYISSYYGYTTYYADSVKGRFTISADTSKNTAYL |
| | | QMNSLRAEDTAVYYCARPAPGHWGFDYWGQGTLVTVS |
| | | SASTKGPSVFPLAPSSKSTSGGTAALGCLVKDYFPEP |
| | | VTVSWNSGALTSGVHTFPAVLQSSGLYSLSSVVTVPS |
| | | SSLGTQTYICNVNHKPSNTKYVDKKVEPKSCDKTHTCP |
| | | PCPAPEAAGGPSVFLFPPKPKDTLMISRTPEVTCVVV |
| | | DVSHEDPEVKFNWYVDGVEVHNAKTKPREEQYNSTYR |
| | | VVSVLTVLHQDWLNGKEYKCKVSNKALGAPIEKTISK |
| | | AKGQPREPQVYTLPPSREEMTKNQVSLTCLVKGFYPS |
| | | DIAVEWESNGQPENNYKTTPPVLDSDGSFFLYSKLTV |
| | | DKSRWQQGNVFSCSVMHEALHNHYTQKSLSLSPGKGG |
| | | [chemical structure] |
| | | [chemical structure] |
| | | [chemical structure] |
| | | [chemical structure] |
| | | L6-F4-RSPO2RA LC SEQ ID NO: 108 |
| | | DIQMTQSPSSLSASVGDRVTITCRASQDVSTAVAWQ |
| | | QKPGKAPKLLIYSASFLYSGVPSRFSGSGSGTDFTLT |
| | | ISSLQPEDFATYYCQQSYTTPPTFGQGTKVEIKGGGG |
| | | SGGGGSGGGGSDIQMTQSPSSLSASVGDRVTITCRAS |
| | | QSVSSAVAWYQQKPGKAPKLLIYSASSLYSGVPSRFS |
| | | GSRSGTDFTLTISSLQPEDFATYYCQQWYYAPITFGQ |
| | | GTKVEIKRTVAAPSVFIFPPSDEQLKSGTASVVCLLN |
| | | NFYPREAKVQWKVDNALQSGNSQESVTEQDSKDSTYS |
| | | LSSTLTLSKADYEKHKVYACEVTHQGLSSPVTKSFNR |
| | | GEC |
| (F49) Fv-IgG | L6-F49- | L6-F49-RSPO2RA HC SEQ ID NO: 109 |
| | RSPO2RA | EVQLVESGGGLVQPGGSLRLSCAASGFTFTSYYISWV |
| | | RQAPGKGLEWVAEISPYSGSTYYADSVKGRFTISADT |
| | | SKNTAYLQMNSLRAEDTAVYYCALRARPPIRLHPRGS |
| | | VMDYWGQGTLVTVSSGGGGSGGGGSGGGGSEVQLVQS |
| | | GAEVKKPGASVKVSCKASGGTFSSYAISWVRQAPGQG |
| | | LEWMGWINAGNGNTTYAQKFQGRVTMTRDTSTSTVYM |
| | | ELSSRLSEDTAVYYCARHYYGSGSYPDWGQGTLVTVS |
| | | SASTKGPSVFPLAPSSKSTSGGTAALGCLVDEKYFPEP |
| | | PCPAPEAAGGPSVFLFPPKPKDTLMISRTPEVTCVVV |
| | | DVSHEDPEVKFNWYVDGVEVHNAKTKPREEQYNSTYR |
| | | VVSVLTVLHQDWLNGKEYKCKVSNKALGAPIEKTISK |
| | | AKGQPREPQVYTLPPSREEMTKNQVSLTCLVKGFYPS |
| | | DIAVEWESNGQPENNYKTTPPVLDSDGSFFLYSKLTV |
| | | DKSRWQQGNVFSCSVMHEALHNHYTQKSLSLSPGKGG |
| | | [chemical structure] |
| | | [chemical structure] |
| | | [chemical structure] |
| | | [chemical structure] |
| | | L6-F49-RSPO2RA LC SEQ ID NO: 110 |
| | | DIQMTQSPSSLSASVGDRVTITCRASQDVSTAVAWYQ |
| | | QKPGKAPKLLIYSASFLYSGVPSRFSGSGSGTDFTLT |
| | | ISSLQPEDFATYYCQQSYTTPPTFGQGTKVEIKRGGG |
| | | GSGGGGSGGGGSDIQMTQSPSSPSASVGDRVTITCRA |
| | | SQSISSYLNWYQQKPGKAPKLLIYAASSLQSGVPSRF |
| | | SGSGSGTDFTLTISSLQPEDFATYYCQQSYSTPLTFG |
| | | GGTKVEIKRTVAAPSVFIFPPSDEQLKSGTASVVCLL |
| | | NNFYPREAKVQWKVDNALQSGNSQESVTEQDSKDSTY |
| | | SLSSTLTLSKADYEKHKVYACEVTHQGLSSPVTKSFN |
| | | RGEC |
| (F10) Fv-IgG | L6-F10- | L6-F10-RSPO2RA HC SEQ ID NO: 111 |
| | RSPO2RA | EQQLVESGGGLVQPGGSLRLSCAASGFTFTSYYISWV |
| | | RQAPGKGLEWVAEISPYSGSTYYADSVKGRFTISADY |
| | | SKNTAYLQMNSLRAEDTAVYYCALRRPPIRLHPRGS |
| | | VMDYWGQGTLVTVSSGGGGSGGGGSGGGGSEVQLVES |
| | | GGGGLVQPGGSLRLSCAASGFTFSSFNMFWVRQAPGKG |
| | | LEWVAGIDDDGSYPNYGSAVKGRATISRDNSKNTLYL |
| | | QMNSLRAEDTAVYYCAKSGYGGSWGGYIADDIDAWGQ |
| | | GTLVTVSSASTKGPSVFPLAPSSKSTSGGTAALGCLV |
| | | KDYFPEPVTVSWSGALTSGVHTFPAVLQSSGLYSLS |
| | | SVVTVPSSSLGTQTYICNVNHKPSNTKVDKKVEPKSC |
| | | DKTHTCPPCPAPEAAGGPSVFLFPPKPKDTLMISRTP |
| | | EVTCVVVDVSHEDPEVKFNWYDGVEVHNAKTKPREE |
| | | QYNSTYRVVSVLTVLHQDWLNGKEYKCKVSNKALGAP |
| | | IEKTISKAKGQPREPQVYTLPPSREEMTKNQVSLTCL |
| | | VKGFYPSDIAVEWESNGQPENNYKTTPPVLDSDGSFF |
| | | LYSKLTVDKSRWQQGNVFSCSVMHEALHNHYTQKSLS |
| | | [chemical structure] |
| | | [chemical structure] |
| | | [chemical structure] |
| | | [chemical structure] |
| | | L6-F10-FSPO2RA LC SEQ ID NO: 112 |
| | | DIQMTQSPSSLSASVGDRVTITCRASQDVSTAVAWYQ |
| | | QKPGDAPKLLIYSASFLYSGVPSRFSGSGSGTDFTLT |
| | | ISSLQPEDFATYYCQQSYTTPPTFGQGTKVEIKGGGG |
| | | SGGGGSGGGGSELTQPPSVSVSPGQTARITCSGDGSY |
| | | AGSYYYGWYQQKPGQAPVTLIYYNNKRPSGIPERFSG |
| | | SLSGSTNTLTISGVQAEDEADYYCGSADNSGAAFGGG |
| | | TKLTVLRTVAAPSVFIFPPSDEQLKSGTASVVCLLNN |
| | | FYPREAKVQWKVDNALQSGNSQESVTEQDSKDSTYSL |
| | | SSTLTLSKADYEKHKVYACEVTHQGLSSPVTKSFNRG |
| | | EC |
| Fv-IgG | L6-F7B- | L6-F7B-RSPO2RA HC SEQ ID NO: 113 |
| | RSPO2RA | EVQLVESGGGLVQPGGSLRLSCAASGFTFTSYYISWV |
| | | RQAPGKGLEWVAEISPYSGSTYYADSVKGRFTISADT |
| | | SKNTAYLQMNSLRAEDTAVYYCALRARPPIRLHPRGS |
| | | VMDYWGQGTLVTVSSGGGGSGGGGSGGGGSEVQLVES |
| | | GGGLVQPGGSLRLSCAASGFNFSSSSIHWVRQAPGKG |
| | | LEWVAYIYPSYDYTYYADSVKGRFTISADTSKNTAYL |
| | | QMNSLRAEDTAVYYCARGYFYTWGGMDYWGQGTLVTV |
| | | SSASTKGPSVFPLAPSSKSTSGGTAALGCLVKDYFPE |
| | | PVTVSWNSGALTSGVHTFPAVLQSSGLYSLSSVVTVP |
| | | SSSLGTQTYICNVNHKPSNTKVDKKVEPKSCDKTHTC |
| | | PPCPAPEAAGGPSVFLFPPKPKDTLMISRTPEVTCVV |
| | | VDVSHEDPEVKFNWYVDGVEVHNAKTKPREEQYNSTY |
| | | RVVSVLTVLHQDWLNGKEYKCKVSNKALGAPIEKTIS |
| | | KAKGQPREPQVYTLPPSREEMTKNQVSLTCLVKGFYP |
| | | SDIAVEWESNGQPENNYKTTPPVLDSDGSFFLYSKLT |
| | | VDKSRWQQGNVFSCSVMHEALHNHYTQKSLSLSPGKG |
| | | [chemical structure] |
| | | [chemical structure] |
| | | [chemical structure] |
| | | -L-6-F7B-RSPO2RA LC SEQ ID NO: 114 |
| | | DIQMTQSPSSLSASVGDRVTITCRASQDVSTAVAWQ |
| | | QKPGKAPKLLIYSASFLYSGVPSRFSGSGSGTDFTLT |
| | | ISSLQPEDFATYYCQQSYTTPPTFGQGTKVEIKRGGG |
| | | GSGGGGSGGGGSDIQMTQSPSSLSASVGDRVTITCRA |
| | | SQSVSSAVAWYQQKPGKAPKLLIYSASSLYSGVPSRF |
| | | SGSRSGTDFTLTISSLQPEDFATYYCQQYYSLFTFGQ |
| | | GTKVEIKRTVAAPSVFIFPPSDEQLKSGTASVVCLLN |
| | | NFYPREAKVQWKVDNALQSGNSQESVTEQDSKDSTYS |
| | | LSSTLTLSKADYEKHKVYACEVTHQGLSSPVTKSFNR |
| | | GEC |
| FV-IgG | L6-F2I- | L6-F2I-RSPO2RA HC SEQ ID NO: 115 |
| | RSPO2RA | EVQLVESGGGLVQPGGSLRLSCAASGFTFTSYYISWV |
| | | RQAPGKGLEWVAEISPYSGSTYYADSVKGRFTISADT |
| | | SKNTAYLQMNSLRAEDTAVYYCALRARPPIRLHPRGS |
| | | VMDYWGQGTLVTVSSGGGGSGGGGSGGGGSEVQLVES |
| | | GGGLVQPGGSLRLSCAASGFNIHSSSIHWVRQAPGKG |
| | | LEWVAATYSSFGSITYADSVKGRFTISADTSKNTAYL |
| | | QMNSLRAEDTAVYYCARYHHPFGYALDYWGQGTLVTV |
| | | SSASTKGPSVFPLAPSSKSTSGGTAALGCLVKDYFPE |
| | | PVTVSWNSGALTSGVHTFPAVLQSSGLYSLSSVVTVP |
| | | SSSLGTQTYICNVNHKPSNTKVDKKVEPKSCDKTHTC |
| | | PPCPAPEAAGGPSVFLFPPKPKDTLMISRTPEVTCVV |
| | | VDVSHEDPEVKFNWYDGVEVHNAKTKPREEQYNSTY |
| | | RVVSVLTVLHQDWLNGKEYKCKVSNKALGAPIEKTIS |
| | | KAKGQPREPQVYTLPPSREEMTKNQVSLTCLVKGFYP |
| | | SDIAVEWESNGQPENNYKTTPPVLDSDGSFFLYSKLT |
| | | VDKSRWQQGNVFSCSVMHEALHNHYTQKSLSLSPGKG |
| | | [chemical structure] |
| | | [chemical structure] |
| | | [chemical structure] |
| | | [chemical structure] |
| | | -L6-F2I-RSPO2RA LC SEQ ID NO: 117 |
| | | DIQMTQSPSSLSASVGDRVTITCRASQDVSTAVAWYQ |
| | | QKPGKAPKLLIYSASFLYSGVPSRFSGSGSGTDFTLT |
| | | ISSLQPEDFATYYCQQSYTTPPTFGQGTKVEIKRGGG |
| | | GSGGGGSGGGGSDIQMTQSPSSLSASVGDRVTITCRA |
| | | SQSVSSAVAWYQQKPGKAPKLLIYSASSLYSGVPSRF |
| | | SGSRSGTDFTLTISSLQPEDFATYYCQQGVYLFTFGQ |
| | | GTKVEIKRTVAAPSVFIFPPSDEQLKSGTASVVCLLN |
| | | NFYPREAKVQWKVDNALQSGNSQESVTEQDSKDSTYS |
| | | LSSTLTLSKADYEKHKVYACEVTHQGLSSPVTKSFNR |
| | | GEC |
| [chemical structure] | L6-N-HC appended ScFv- F12578-IgG- RSPO2Ra | L6-N-HC appended ScFv-F12578-IgG-RSPO2RA HC SEQ ID NO: 118 EVQLVESGGGLVQPGGSLRLSCAASGFTFTSY YISWVRQAPGKGLEWVAEISPYSGSTYYADSV KGRFTISADTSKNTAYLQMNSLRAEDTAVYYC ALRARPPIRLHPRGSVMDYWGQGTLVTVSSGS AASGSSGGSSSGADIQMTQSPSSLSASVGDRVTIT CRASQDVSTAVAWYQQKPGKAPKLLIYSASFL YSGVPSRFSGSGSGTDFTLTISSLQPEDFATYY CQQSYTTPPTFGQGTKVEIKGGGGSGGGGSGG GGSEVQLVESGGGLVQPGGSLRLSCAASGFTF SHYTLSWVRQAPGKGLEWVSVISGDGSYTYY ADSVKGRFTISSDNSKNTLYLQMNSLRAEDTA VYYCARNFIKYVFANWGQGTLVTVSSASTKGP SVFPLAPSSKSTSGGTAALGCLVKDYFPEPVTVS |
| | | WNSGALTSGVHTFPAVLQSSGLYSLSSVVTVPSS |
| | | SLGTQTYICNVNHKPSNTKVDKKVEPKSCDKTH |
| | | TCPPCPAPEAAGGPSVFLFPPKPKDTLMISRTPEV |
| | | TCVVVDVSHEDPEVKFNWYYVDGVEVHNAKTKP |
| | | REEQYNSTYRVVSVLTVLHQDWLNGKEYKCKV |
| | | SNKALGAPIEKTISKAKGQPREPQVYTLPPSREEM |
| | | TKNQVSLTCLVKGFYPSDIAVEWESNGQPENNY |
| | | KTTPPVLDSDGSFFLYSKLTVDKSRWQQGNVFSC |
| | | SVMHEALHNHYTQKSLSLSPGKGGGGSGSGGSG |
| | | [chemical structure] |
| | | [chemical structure] |
| | | [chemical structure] |
| | | [chemical structure] |
| | | >F12578 LC SEQ ID NO: 119 |
| | | DIELTQPPSVSVAPGQTARISCSGDNIGSFYVH |
| | | WYQQKPGQAPVLVIYDKSNRPSGIPERFSGSN |
| | | SGNTATLTISGTQAEDEADYYCQSYANTLSLV |
| | | FGGGTKLTVLGQPKAAPSVTLFPPSSEELQANK |
| | | ATLVCLISDFYPGAVTVAWKADSSPVKAGVETT |
| | | TPSKQSNNKYAASSYLSLTPEQWKSHRSYSCQVT |
| | | HEGSTVEKTVAPTECS |
| N-HC-appended scFv-IgG- | L6-HC | L6-N-HC appended ScFv-F127-IgG-RSPO2RA HC |
| mutRspo2 | appended | SEQ ID NO: 120 |
| | ScFv-F127- | EVQLVESGGGLVQPGGSLRLSCAASGFTFTSY |
| | IgG- | YISWVRQAPGKGLEWVAEISPYSGSTYYADSV |
| | RSPO2RA | KGRFTISADTSKNTAYLQMNSLRAEDTAVYYC |
| | | ALRARPPIRLHPRGSVMDYWGQGTLVTVSSGS |
| | | AASGSSGGSSSGADIQMTQSPSSLSASVGDRVTIT |
| | | CRASQDVSTAVAWYQQKPGKAPKLLIYSASFL |
| | | YSGVPSRFSGSGSGTDFTLTISSLQPEDFATYY |
| | | CQQSYTTPPTFGQGTKVEIKGGGGSGGGGSGG |
| | | GGSEVQLVESGGGLVQPGGSLRLSCAASGFNIS |
| | | SSYIHWVRQAPGKGLEWVAYIYSSYGSTYYAD |
| | | SVKGRFTISADTSKNTAYLQMNSLRAEDTAVY |
| | | YCARASWYALDYWGQGTLVTVSSASTKGPSVF |
| | | PLAPSSKSTSGGTAALGCLVKDYFPEPVTVSWNS |
| | | GALTSGVHTFPAVLQSSGLYSLSSVVTVPSSSLGT |
| | | QTYICNVNHKPSNTKVDKKVEPKSCDKTHTCPP |
| | | CPAPEAAGGPSVFLFPPKPKDTLMISRTPEVTCVV |
| | | VDVSHEDPEVKFNWYVDGVEVHNAKTKPREEQ |
| | | YNSTYRVVSVLTVLHQDWLNGKEYKCKVSNKA |
| | | LGAPIEKTISKAKGQPREPQVYTLPPSREEMTKN |
| | | QVSLTCLVKGFYPSDIAVEWESNGQPENNYKTTP |
| | | PVLDSDGSFFLYSKLTVDKSRWQQGNVFSCSVM |
| | | HEALHNHYTQKSLSLSPGKGGGGSGSGGSGGGG |
| | | [chemical structure] |
| | | [chemical structure] |
| | | [chemical structure] |
| | | [chemical structure] |
| | | >F127LC SEQ ID NO: 121 |
| | | DIQMTQSPSSLSASVGDRVTITCRASQSVSSAV |
| | | AWYQQKPGKAPKLLIYSASSLYSGVPSRFSGS |
| | | RSGTDFTLTISSLQPEDFATYYCQQYWYGVAP |
| | | ITFGQGTKVEIKRTVAAPSVFIFPPSDEQLKSGT |
| | | ASVVCLLNNFYPREAKVQWKVDNALQSGNSQE |
| | | SVTEQDSKDSTYSLSSTLTLSKADYEKHKVTACE |
| | | VTHQGLSSPVTKSFNRGEC |
| N-HC-appended scFv-IgG- | L6-N-HC | L6-N-HC appended ScFv-F58-IgG-RSPO2RA HC |
| mutRspo2 | appended | SEQ ID NO: 122 |
| | ScFv-F58- | EVQLVESGGGLVQPGGGSLRLSCAASGFTFTSY |
| | IgG- | YISWVRQAPGKGLEWVAEISPYSGSTYYADSV |
| | RSPO2RA | KGRFTISADTSKNTAYLQMNSLRAEDTAVYYC |
| | | ALRARPPIRLHPRGSVMDYWGQGTLVTVSSGS |
| | | AASGSSGGSSSSGADIQMTQSPSSLSASVGDRVTIT |
| | | CRASQDVSTAVAWYQQKPGKAPKKLIYSASFL |
| | | YSGVPSRFSGSGSGTDFTLTISSLQPEDFATYY |
| | | CQQSYTTPPTFGQGTKVEIKGGGGSGGGGSGG |
| | | GGSEVQLVESGGGLVQPGGSLRLSCAASGFNIS |
| | | YSYIHWVRQAPGKGLEWVASIYSSSGSTSYAD |
| | | SVKGRFTISADTSKNTAYLQMNSLRAEDTAVY |
| | | YCARGAIDYWGQGTLVTVSSASTKGPSVFPLAP |
| | | SSKSTSGGTAALGCLVKDYFPEPVTVSWNSGALT |
| | | SGVHTFPAVLQSSGLYSLSSVVTVPSSSLGTQTYI |
| | | CNVNHKPSNTKVDKKVEPKSCDKTHTCPPCPAP |
| | | EAAGGPSVFLFPPKPKDTLMISRTPEVTCVVVDV |
| | | SHEDPEVKFNWYCDGVEHNAKTKPREEQYNS |
| | | TYRVVSVLTVLHQDWLNGKEYKCKVSNKALGA |
| | | PIEKTISKAKGQPREPQVYTLPPSREEMTKNQVSL |
| | | TCLVKGFYPSIAVEWESNGQPENNYKTTPPVLD |
| | | SDGSFFLYSKLTVDKSRWQQGNVFSCSVMHEAL |
| | | [chemical structure] |
| | | [chemical structure] |
| | | [chemical structure] |
| | | [chemical structure] |
| | | [chemical structure] |
| | | >F58 LC SEQ ID NO: 123 |
| | | DIQMTQSPSSLSASVGDRVTITCRASQSVSSAV |
| | | AWYQQKPGKAPKLLIYSASSLYSGVPSRFSGS |
| | | RSGTDFTLTISSLQPEDFATYYCQQWYSSGHV |
| | | LITFGQGTKVEIKRTVAAPSVFIFPPSDEQLKSGT |
| | | ASVVCLLNNFYPREAKVQWKVDNALQSGNSQE |
| | | SVTEQDSKDSTYSLSSTLTLSKADYEKHKVYACE |
| | | VTHQGLSSPVTKSFNRGEC |
| N-HC-appended scFv-IgG- | L6-N-HC | L6-N-HC appended ScFv-F4-2-IgG-RSPO2RA HC |
| mutRspo2 | appended | SEQ ID NO: 124 |
| | ScFv-F4-2- | EVQLVESGGGLVQPGGSLRLSCAASGFTFTSV |
| | IgG- | YISWVRQAPGKGLEWVAEISPYSGSTYYADSV |
| | RSPO2RA | KGRFTISADTSKNTAYLQMNSLRAEDTAVYYC |
| | | ALRARPPIRLHPRGSVMDYWGQGTLVTVSSGS |
| | | AASGSSGGSSSGADIQMTQSPSSLSASVGDRVTIT |
| | | CRASQDVSTAVAWYQQKPGKAPKLLIYSASFL |
| | | YSGVPSRFSGSGSGTDFTLTISSLQPEDFATYY |
| | | CQQSYTTPPTFGQGTKVEIKGGGGSGGGGSGG |
| | | GGSEVQLVESGGGLVQPGGSLRLSCAASGFNIS |
| | | YYYIHWVRQAPGKGLEWVASIYPSSGYTYYA |
| | | DSVKGRFTISADTSKNTAYLQMNSLRAEDTAV |
| | | YYCARSSFYWAMDYWGQGTLVTVSSASTKGP |
| | | SVFPLAPSSKSTSGGTAALGCLVKDYFPEPVTVS |
| | | WNSGALTSGVHTFPAVLQSSGLYSLSSVVTVPSS |
| | | SLGTQTYICNVNHKPSNTKVDKKVEPKSCDKTH |
| | | TCPPCPAPEAAGGPSVFLFPPKPKDTLMISRTPEV |
| | | TCVVVDVSHEDPEVKFNWYVDGVEVHNAKTKP |
| | | REEQYNSTYRVVSVLTVLHQDWLNGKEYKCKV |
| | | SNKALGAPIEKTISKAKGQPREPQVYTLPPSREEM |
| | | TKNQVSLTCLVKGFYPSDIAVEWESNGQPENNY |
| | | KTTPPVLDSDGSFFLYSKLTVDKSRWQQGNVFSC |
| | | SVMHEALHNHYTQKSLSLSPGKGGGGSGSGGSG |
| | | [chemical structure] |
| | | [chemical structure] |
| | | [chemical structure] |
| | | [chemical structure] |
| | | >F4-2 LC SEQ ID NO: 125 |
| | | DIQMTQSPSSLSASVGDRVTITCRASQSVSSAV |
| | | AWYQQKPGKAPKLLIYSASSLYSGVPSRFSGS |
| | | RSGTDFTLTISSLQPEDFATYYCQQSYAAYLFT |
| | | FGQGTKVEIKRTVAAPSVFIFPPSDEQLKSGTAS |
| | | VVCLLNNFYPREAKVQWKVDNALQSGNSQESV |
| | | TEQDSKDSTYSLSSTLTLSKADYEKHKVYACEVT |
| | | HQGLSSPVTKSFNRGEC |
| N-HC-appended scFv-IgG- | L6-N-HC | L6-N-HC appended ScFv-F4-IgG-RSPO2RA HC SEQ |
| mutRspo2 | appended | ID NO: 126 |
| | ScFv-F4- | EVQLVESGGGLVQPGGSLRLSCAASGFTFTSY |
| | IgG- | YISWVRQAPGKGLEWVAEISPYSGSTYYADSV |
| | RSPO2RA | KGRFTISADTSKNTAYLQMNSLRAEDTAVYYC |
| | | ALRARPPIRLHPRGSVMDYWGQGTLVTVSSGS |
| | | AASGSSGGSSSGADIQMTQSPSSLSASVGDRVTIT |
| | | CRASQDVSTAVAWYQQKPGKAPKLLIYSASFL |
| | | YSGVPSRFSGSGSGTDFTLTISSLQPEDFATYY |
| | | CQQSYTTPPTFGQGTKVEIKGGGGSGGGGSGG |
| | | GGSEVQLVESGGGLVQPGGSLRLSCAASGFNL |
| | | SSYSMHWVRQAPGKGLEWVAYISSYYGYTYY |
| | | ADSVKGRFTISADTSKNTAYLQMNSLRAEDTA |
| | | VYYCARPAPGHWGFDYWGQGTLVTVSSASTK |
| | | GPSVFPLAPSSKSTSGGTAALGCLVKDYFPEPVT |
| | | VSWNSGALTSGVHTFPAVLQSSGLYSLSSVVTVP |
| | | SSSLGTQTYICNVNHKPSNTKVDKKVEPKSCDKT |
| | | HTCPPCPAPEAAGGPSVFLFPPKPKDTLMISRTPE |
| | | VTCVVVDVSHEDPEVKFNWYVDGVEVHNAKTK |
| | | PREEQYNSTYRVVSVLTVLHQDWLNGKEYKCK |
| | | VSNKALGAPIEKTISKAKGQPREPQVYTLPPSREE |
| | | MTKNQVSLTCLVKGFYPSDIAVEWESNGQPENN |
| | | YKTTPPVLDSDGSFFLYSKLTVDKSRWQQGNVF |
| | | SCSVMHEALHNHYTQKSLSLSPGKGGGGSGSGG |
| | | [chemical structure] |
| | | [chemical structure] |
| | | [chemical structure] |
| | | [chemical structure] |
| | | >F4 LC SEQ ID NO: 127 |
| | | DIQMTQSPSSLSASVGDRVTITCRASQSVSSAV |
| | | AWYQQKPGKAPKLLIYSASSLYSGVPSRFSGS |
| | | RSGTDFTLTISSLQPEDFATYYCQQWYYAPITF |
| | | GQGTKVEIKRTVAAPSVFIFPPSDEQLKSGTASV |
| | | VCLLNNFYPREAKVQWKVDNALQSGNSQESVTE |
| | | QDSKDSTYSLSSTLTLSKADYEKHKVYACEVTH |
| | | QGLSSPVTKSFNRGEC |
| N-HC-appended scFv-IgG- | L6-N-HC | L6-N-HC appended ScFv-F49-IgG-RSPO2$A HC |
| mutRspo2 | appended | SEQ ID NO: 128 |
| | ScFv-F49- | EVQLVESGGGLVQPGGSLRLSCAASGFTFTSY |
| | IgG- | YISWVRQAPGKGLEWVAEISPYSGSTYYADSV |
| | RSPO2RA | KGRFTISADTSKNTAYLQMNSLRAEDTAVYYC |
| | | ALRARPPIRLHPRGSVMDYWGQGTLVTVSSGS |
| | | AASGSSGGSSSGADIQMTQSPSSLSASVGDRVTIT |
| | | CRASQDVSTAVAWYQQKPGKAPKLLIYSASFL |
| | | YSGVPSRFSGSGSGTDFTLTISSLQPEDFATYY |
| | | CQQSYTTPPTFGQGTKVEIKGGGGSGGGGSGG |
| | | GGSQVQLVQSGAEVKKPGASVKVSCKASGGT |
| | | FSSYAISWVRQAPGQGLEWMGWINAGNGNTT |
| | | YAQKFQGRVTMTRDTSTSTVYMELSSLRSEDT |
| | | AVYYCARHYYGSGSYPDWGQGTLVTVSSAST |
| | | KGPSVFPLAPSSKSTSGGTAALGCLVKDYFPEPV |
| | | TVSWNSGALTSGVHTFPAVLQSSGLYSLSSVVTV |
| | | PSSSLGTQTYICNVNHKPSNTKVDKKVEPKSCDK |
| | | THTCPPCPAPEAAGGPSVFLFPPKPKDTLMISRTP |
| | | EVTCVVVDVSHEDPEVKFNWYVDGVEVHNAKT |
| | | KPREEQYNSTYRVVSVLTVLHQDWLNGKEYKC |
| | | KVSNKALGAPIEKTISKAKGQPREPQVYTLPPSRE |
| | | EMTKNQVSLTCLVKGFYPSDIAVEWESNGQPEN |
| | | NYKTTPPVLDSDGSFFLYSKLTVDKSRWQQGNV |
| | | FSCSVMHEALHNHYTQKSLSLSPGKGGGGSGSG |
| | | [chemical structure] |
| | | [chemical structure] |
| | | [chemical structure] |
| | | [chemical structure] |
| | | >F49 LC SEQ ID NO: 129 |
| | | DIQMTQSPSSPSASVGDRVTITCRASQSISSYLN |
| | | WYQQKPGKAPKLLIYAASSLQSGVPSRFSGSG |
| | | SGTDFTLTISSLQPEDFATYYCQQSYSTPLTFG |
| | | GGTKVEIKRTVAAPSVFIFPPSDEQLKSGTASVV |
| | | CLLNNFYPREAKVQWKVDNALQSGNSQESVTEQ |
| | | DSKDSTYSLSSTLTLSKADYEKHKVYACEVTHQ |
| | | GLSSPVTKSFNRGEC |
| N-HC-appended scFv-IgG- | L6-N-HC | L6-N-HC appended ScFv-F10-IgG-RSPO2RA HC |
| mutRspo2 | appended | SEQ ID NO: 130 |
| | ScFv-F10- | EVQLVESGGGLVQPGGSLRLSCAASGFTFTSY |
| | IgG- | YISWVRQAPGKGLEWVAEISPYSGSTYYADSV |
| | RSPO2RA | KGRFTISADTSKNTAYLQMNSLRAEDTAVYYC |
| | | ALRARPPIRLHPRGSVMDYWGQGTLVTVSSGS |
| | | AASGSSGGSSSGADIQMTQSPSSLSASVGDRVTIT |
| | | CRASQDVSTAVAWYQQKPGKAPKLLIYSASFL |
| | | YSGVPSRFSGSGSGTDFTLTISSLQPEDFATYY |
| | | CQQSYTTPPTFGQGTKVEIKGGGGSGGGGSGG |
| | | GGSEVQLVESGGGLVQPGGSLRLSCAASGFTF |
| | | SSFNMFWVRQAPGKGLEWVAGIDDDGSYPNY |
| | | GSAVKGRATISRDNSKNTLYLQMNSLRAEDTA |
| | | VYYCAKSGYGGSWGGYIADDIDAWGQGTLVT |
| | | VSSASTKGSVFPLAPSSKSTSGGTAALGCLVKD |
| | | YFPEPVTVSWNSGALTSGVHTFPAVLQSSGLYSL |
| | | SSVVTVPSSSLGTQTYICNVNHKPSNTKVDKKVE |
| | | PKSCDKTHTCPPCPAPEAAGGPSVFLFPPKPKDTL |
| | | MISRTPEVTCVVVDVSHEDPEVKFNWYVDGVEV |
| | | HNAKTKPREEQYNSTYRVVSVLTVLHQDWLNG |
| | | KEYKCKVSNKALGAPIEKTISKAKGQPREPQVYT |
| | | LPPSREEMTKNQVSLTCLVKGFYPSDIAVEWESN |
| | | GQPENNYKTTPPVLDSDGSFFLYSKLTVDKSRW |
| | | QQGNVFSVMHEALHNHYTQKSLSLSPGKGGG |
| | | [chemical structure] |
| | | [chemical structure] |
| | | [chemical structure] |
| | | [chemical structure] |
| | | >F10 LC SEQ ID NO: 131 |
| | | ELTQPPSVSVSPGQTARITCSGDGSYAGSYYYG |
| | | WYQQKPGQAPVTLIYYNNKRPSGIPERFSGSL |
| | | SGSTNTLTISGVQAEDEADYYCGSADNSGAAF |
| | | GGGTKLTVLRTVAAPSVFIFPPSDEQLKSGTASV |
| | | VCLLNNFYPREAKVQWKVDNALQSGNSQESVTE |
| | | QDSKDSTYSLSSTLTLSKADYEKHKVYACEVTH |
| | | QGLSSPVTKSFNRGEC |
| [chemical structure] | L6-N-Hc appended ScFv- F12578-IgG- RSPO2RA- Knob-his + F12578-IgG- RSPO2RA Hole-Flag | L6-N-HC appended ScFv-F12578-IgG-RSPO2RA- Knob-His HC SEQ ID NO: 132 EVQLVESGGGLVQPGGSLRLSCAASGFTFTSY YISWVRQAPGKGLEWVAEISPYSGSTYYADSV KGRFTISADTSKNTAYLQMNSLRAEDTAVYYC ALRARPPIRLHPRGSVMDYWGQGTLVTVSSGS AASGSSGGSSSGADIQMTQSPSSLSASVGDRVTIT CRASQDVSTAVAWYQQKPGKAPKLLIYSASFL YSGVPSRFSGSGSGTDFTLTISSLQPEDFATYY CQQSYTTPPTFGQGTKVEIKGGGGSGGGGSGG GGSEVQLVESGGGLVQPGGSLRLSCAASGFTF SHYTLSWVRQAPGKGLEWVSVISGDGSYTYY ADSVKGRFTISSDNSKNTLYLQMNSLRAEDTA VYYCARNFIKYVFANWGQGTLVTVSSASTKGP SVFPLAPSSKSTSGGTAALGCLVKDYFPEPVTVS WNSGALTSGVHTFPAVLQSSGLYSLSSVVTVPSS |
| | | SLGTQTYICNVNHKPSNTKVDKKVEPKSCDKTH |
| | | TCPPCPAPEAAGGPSVFLFPPKPKDTLMISRTPEV |
| | | TCVVVDVSHEDPEVKFNWYVDGVEVHNAKTKP |
| | | REEQYNSTYRVVSVLTVLHQDWLNGKEYKCKV |
| | | SNKALGAPIEKTISKAKGQPREPQVYTLPPSREEM |
| | | TKNQVSLWCLVKGFYPSDIAVEWESNGQPENNY |
| | | KTTPPVLDSDGSFFLYSKLTVDKSRWQQGNVFSC |
| | | SVMHEALHNHYTQKSLSLSPGKGGGGSGGGGSG |
| | | [chemical structure] |
| | | [chemical structure] |
| | | [chemical structure] |
| | | [chemical structure] |
| | | >F12578-IgG-RSPO2RA-Hole Flag HC SEQ ID |
| | | NO: 133 |
| | | EVQLVESGGGLVQPGGSLRLSCAASGFTFSHY |
| | | TLSWVRQAPGKGLEWVSVISGDGSYTYYADS |
| | | VKGRFTISSDNSKNTLYLQMNSLRAEDTAVYY |
| | | CARNFIKYYFANWGQGTLVTVSSASTKGPSVFP |
| | | LAPSSKSTSGGTAALGCLVKDYFPEPVTVSWNSG |
| | | ALTSGVHTFPAVLQSSGLYSLSSVVTVPSSSLGTQ |
| | | TYICNVNHKPSNTKVDKKVEPKSCDKTHTCPPCP |
| | | APEAAGGPSVFLFPPKPKDTLMISRTPEVTCVVV |
| | | DVSHEDPEVKFNWYVDGVEVHNAKTKPREEQY |
| | | NSTYRVVSVLTVLHQDWLNGKEYKCKVSNKAL |
| | | GAPIEKTISKAKGQPREPQVYTLPPSREEMTKNQ |
| | | VSLSCAVKGFYPSDIAVEWESNGQPENNYKTTPP |
| | | VLDSDGSFFLVSKLTVDKSRWQQGNVFSCSVMH |
| | | EALHNHYTQKSLSLSPGKGGGGSGGGGSGGGGS |
| | | [chemical structure] |
| | | [chemical structure] |
| | | >F12578 LC SEQ ID NO: 134 |
| | | DIELTQPPSVSVAPGQTARISCSGDNIGSFYVH |
| | | WYQQKPGQAPVLVIYDKSNRPSGIPERFSGSN |
| | | SGNTATLTISGTQAEDEADYYCQSYANTLSLV |
| | | FGGGTKLTVLGQPKAAPSVTLFPPSSEELQANK |
| | | ATLVCLISDFYPGAVTVAWKADSSPVKAGVETT |
| | | TPSKQSNNKYAASSYLSLTPEQWKSHRSYSCQVT |
| | | HEGSTVEKTVAPTECS |
| N-HC appended ScFv-IgG- | L6-N-HC | L6-N-HC appended ScFv-F127-IgG-RSPO2RA-Knob- |
| mutRspo2-Knob + | appended | His HC SEQ ID NO: 135 |
| IgG-mutRspo2-Hole | ScFv-F127- | EVQLVESGGGLVQPGGSLRLSCAASGFTFTSY |
| | IgG- | YISWVRQAPGKGLEWVAEISPYSGSTYYADSV |
| | RSPO2RA- | KGRFTISADTSKNTAYLQMNSLRAEDTAVYYC |
| | Knob-his + | ALRARPPIRLHPRGSVMDYWGQGTLVTVSSGS |
| | F127-IgG- | AASGSSGGSSSGADIQMTQSPSSLSASVGDRVTIT |
| | RSPO2RA | CRASQDVSTAVAWYQQKPGKAPKLLIYSASFL |
| | Hole-Flag | YSGVPSRFSGSGSGTDFTLTISSLQPEDFATYY |
| | | CQQSYTTPPTFGQGTKVEIKGGGGSGGGGSGG |
| | | GGSEVQLVESGGGLVQPGGSLRLSCAASGFNIS |
| | | SSYIHWVRQAPGKGLEWVAYIYSSYGSTYYAD |
| | | SVKGRFTISADTSKNTAYLQMNSLRAEDTAVY |
| | | YCARASWYALDYWGQGTLVTVSSASTKGPSVF |
| | | PLAPSSKSTSGGTAALGCLVKDYFPEPVTVSWNS |
| | | GALTSGVHTFPAVLQSSGLYSLSSVVTVPSSSLGT |
| | | QTYICNVNHKPSNTKVDKKVEPKSCDKTHTCPP |
| | | CPAPEAAGGPSVFLFPPKPKDTLMISRTPEVTCVV |
| | | VDVSHEDPEVKFNWYVDGVEVHNAKTKPREEQ |
| | | YNSTYRVVSVLTVLHQDWLNGKEYKCKVSNKA |
| | | LGAPIEKTISKAKGQPREPQVYTLPPSREEMTKN |
| | | QVSLWCLVKGFYPSDIAVEWESNGQPENNYKTT |
| | | PPVLDSDGSFFLYSKLTVDKSRWQQGNVFCSV |
| | | MHEALHNHYTQKSLSLSPGKGGGGSGGGGSGGG |
| | | [chemical structure] |
| | | [chemical structure] |
| | | [chemical structure] |
| | | [chemical structure] |
| | | >F127-IgG-RSPO2RA-Hole Flag HC SEQ ID |
| | | NO: 136 |
| | | EVQLVESGGGLVQPGGSLRLSCAASGFNISSSY |
| | | IHWVRQAPGKGLEWVAYIYSSYGSTYYADSV |
| | | KGRFTISADTSKNTAYLQMNSLRAEDTAVYYC |
| | | ARASWYALDYWGQGTLVTVSSASTKGPSVFPL |
| | | APSSKSTSGGTAALGCLVKDYFPEPVTVSWNSG |
| | | ALTSGVHTFPAVLQSSGLYSLSSVVTVPSSSLGTQ |
| | | TYICNVNHKPSNTKVDKKVEPKSCDKTHTCPPCP |
| | | APEAAGGPSVFLFPPKPKDTLMISRTPEVTCVVV |
| | | DVSHEDPEVKFNWYVDGVEVHNAKTKPREEQY |
| | | NSTYRVVSVLTVLHQDWLNGKEYKCKVSNKAL |
| | | GAPIEKTISKAKGQPREPQVYTLPPSREEMTKNQ |
| | | VSLSCAVKGFYPSDIAVEWESNGQPENNYKTTPP |
| | | VLDSDGSFFLVSKLTVDKSRWQQGNVFSCSVMH |
| | | EALHNHYTQKSLSLSPGKGGGGSGGGGSGGGGS |
| | | [chemical structure] |
| | | [chemical structure] |
| | | [chemical structure] |
| | | [chemical structure] |
| | | >F127 LC SEQ ID NO: 137 |
| | | DIQMTQSPSSLSASVGDRVTITCRASQSVSSAV |
| | | AWYQQKPGKAPKLLIYSASSLYSGVPSRFSGS |
| | | RSGTDFTLTISSLQPEDFATYYCQQYWYGVAP |
| | | ITFGQGTKVEIKRTVAAPSVFIFPPSDEQLKSGT |
| | | ASVVCLLNNFYPREAKVQWKVDNALQSGNSQE |
| | | SVTEQDSKDSTYSLSSTLTLSKADYEKHKVYACE |
| | | VTHQGLSSPVTKSFNRGEC |
| N-HC appended ScFv-IgG- | L6-N-HC | L6-N-HC appended ScFv-F58-IgG-RSPO2RA-Knob- |
| mutRspo2-Knob + | appended | His HC SEQ ID NO: 138 |
| IgG-mutRspo2-Hole | ScFv-F58- | EVQLVESGGGLVQPGGSLRLSCAASGFTFTSY |
| | IgG- | YISWVRQAPGKGLEWVAEISPYSGSTYYADSV |
| | RSPO2RA- | KGRFTISADTSKNTAYLQMNSLRAEDTAVYYC |
| | Knob-his + | ALRARPPIRLHPRGSVMDYWGQGTLVTVSSGS |
| | F58-IgG- | AASGSSGGSSSGADIQMTQSPSSLSASVGDRVTIT |
| | RSPO2RA | CRASQDVSTAVAWYQQKPGKAPKLLIYSASFL |
| | Hole-Flag | YSGVPSRFSGSGSGTDFTLTISSLQPEDFATYY |
| | | CQQSYTTPPTFGQGTKVEIKGGGGSGGGGSGG |
| | | GGSEVQLVESGGGLVQPGGSLRLSCAASGFNIS |
| | | YSYIHWVRQAPGKGLEWVASIYSSSGSTSYAD |
| | | SVKGRFTISADTSKNTATYLQMNSLRAEDTAVY |
| | | YCARGAIDYWGQGTLVTVSSASTKGPSVFPLAP |
| | | SSKSTSGGTAALGCLVKDYFPEPVTVSWNSGALT |
| | | SGVHTFPAVLQSSGLYSLSSVVTVPSSSLGTQTYI |
| | | CNVNHKPSNTKVDKKVEPKSCDKTHTCPPCPAP |
| | | EAAGGPSVFLFPPKPKDTLMISRTPEVTCVVVDV |
| | | SHEDPEVKFNWYVDGVEVHNAKTKPREEQYNS |
| | | TYRVVSVLTVLHQDWLNGKEYKCKVSNKALGA |
| | | PIEKTISKAKGQPREPQVYTLPPSREEMTKNQVSL |
| | | WCLVKGFYPSDIAVEWESNGQPENNYKTTPPVL |
| | | DSDGSFFLYSKLTVDKSRWQQGNVFSCSVMHEA |
| | | [chemical structure] |
| | | [chemical structure] |
| | | [chemical structure] |
| | | [chemical structure] |
| | | [chemical structure] |
| | | >F58-IgG-RSPO2RA-Hole Flag HC SEQ ID NO: 139 |
| | | EVQLVESGGGLVQPGGSLRLSCAASGFNISYS |
| | | YIHWVRQAPGKGLEWVASIYSSSGSTSYADSV |
| | | KGRFTISADTSKNTAYLQMNSLRAEDTAVYYC |
| | | ARGAIDYWGQGTLVTVSSASTKGPSVFPLAPSS |
| | | KSTSGGTAALGCLVKDYFPEPVTVSWNSGALTS |
| | | GVHTFPAVLQSSGLYSLSSVVTVPSSSLGTQTYIC |
| | | NVNHKPSNTKVDKKVEPKSCDKTHTCPPCPAPE |
| | | AAGGPSVFLFPPKPKDTLMISRTPEVTCVVVDVS |
| | | HEDPEVKFNWYVDGVEVHNAKTKPREEQYNST |
| | | YRVVSVLTVLHQDWLNGKEYKCKVSNKALGAP |
| | | IEKTISKAKGQPREPQVYTLPPSREEMTKNQVSLS |
| | | CAVKGFYPSDIAVEWESNGQPENNYKTTPPVLDS |
| | | DGSFFLVSKLTVDKSRWQQGNVFSCSVMHEALH |
| | | [chemical structure] |
| | | [chemical structure] |
| | | [chemical structure] |
| | | [chemical structure] |
| | | [chemical structure] |
| | | >F58 LC SEQ ID NO: 140 |
| | | DIQMTQSPSSLSASVGDRVTITCRASQSVSSAV |
| | | AWYQQKPGKAPKLLIYSASSLYSGVPSRFSGS |
| | | RSGTDFTLTISSLQPEDFATYYCQQWYSSGHV |
| | | LITFGQGTKVEIKRTVAAPSVFIFPPSDEQLKSGT |
| | | ASVVCLLNNFYPREAKVQWKVDNALQSGNSQE |
| | | SVTEQDSKDSTYSLSSTLTLSKADYEKHKVYACE |
| | | VTHQGLSSPVTKSFNRGEC |
| N-HC appended ScFv-IgG- | L6-N-HC | L6-N-HC appended ScFv-F4-2-IgG-RSPO2RA-Knob- |
| mutRspo2-Knob + | appended | His HC SEQ ID NO: 141 |
| IgG-mutRspo2-Hole | ScFv-F4-2- | EVQLVESGGGLVQPGGSLRLSCAASGFTFTSY |
| | IgG- | YISWVRQAPGKGLEWVAEISPYSGSTYYADSV |
| | RSPO2RA- | KGRFTISADTSKNTAYLQMNSLRAEDTAVYYC |
| | Knob-his + | ALRARPPIRLHPRGSVMDYWGQGTLVTVSSGS |
| | F4-2-IgG- | AASGSSGGSSSGADIQMTQSPSSLSASVGDRVTIT |
| | RSPO2RA | CRASQDVSTAVAWYQQKPGKAPKLLIYSASFL |
| | Hole-Flag | YSGVPSRFSGSGSGTDFTLTISSLQPEDFATYY |
| | | CQQSYTTPPTFGQGTKVEIKGGGGSGGGGSGG |
| | | GGSEVQLVESGGGLVQPGGSLRLSCAASGFNIS |
| | | YYYIHWVRQAPGKGLEWVASIYPSSGYTYYA |
| | | DSVKGRFTISADTSKNTAYLQMNSLRAEDTAV |
| | | YYCARSSFYWAMDYWGQGTLVTVSSASTKGP |
| | | SVFPLAPSSKSTSGGTAALGCLVKDYFPEPVTVS |
| | | WNSGALTSGVHTFPAVLQSSGLYSLSSVVTVPSS |
| | | SLGTQTYICNVNHKPSNTKVDKKVEPKSCDKTH |
| | | TCPPCPAPEAAGGPSVFLFPPKPKDTLMISRTPEV |
| | | TCVVVDVSHEDPEVKFNWYVDGVEVHNAKTKP |
| | | REEQYNSTYRVVSVLTVLHQDWLNGKEYKCKV |
| | | SNKALGAPIEKTISKAKGQPREPQVYTLPPSREEM |
| | | TKNQVSLWCLVKGFYPSDIAVEWESNGQPENNY |
| | | KTTPPVLDSDGSFFLYSKLTVDKSRWQQGNVFSC |
| | | SVMHEALHNHYTQKSLSLSPGKGGGGSGGGGSG |
| | | [chemical structure] |
| | | [chemical structure] |
| | | [chemical structure] |
| | | [chemical structure] |
| | | >F4-2-IgG-RSPO2RA-Hole Flag HC SEQ ID |
| | | NO: 142 |
| | | EVQLVESGGGLVQPGGSLRLSCAASGFNISYY |
| | | YIHWVRQAPGKGLEWVASIYPSSGYTYYADSV |
| | | KGRFTISADTSKNTAYLQMNSLRAEDTAVYYC |
| | | ARSSFYWAMDYWGQGTLVTVSSASTKGPSVFP |
| | | LAPSSKSTSGGTAALGCLVKDYFPEPVTVSWNSG |
| | | ALTSGVHTFPAVLQSSGLYSLSSVVTVPSSSLGTQ |
| | | TYICNVNHKPSNTKVDKKVEPKSCDKTHTCPPCP |
| | | APEAAGGPSVFLFPPKPKDTLMISRTPEVTCVVV |
| | | DVSHEDPEVKFNWYVDGVEVHNAKTKPREEQY |
| | | NSTYRVVSVLTVLHQDWLNGKEYKCKVSNKAL |
| | | GAPIEKTISKAKGQPREPQVYTLPPSREEMTKNQ |
| | | VSLSCAVKGFYPSDIAVEWESNGQPENNYKTTPP |
| | | VLDSDGSFFLVSKLTVDKSRWQQGNVFSCSVMH |
| | | EALHNHYTQKSLSLSPGKGGGGSGGGGSGGGGS |
| | | [chemical structure] |
| | | [chemical structure] |
| | | [chemical structure] |
| | | [chemical structure] |
| | | >F4-2 LC SEQ ID NO: 143 |
| | | DIQMTQSPSSLSASVGDRVTITCRASQSVSSAV |
| | | AWYQQKPGKAPKLLIYSASSLYSGVPSRFSGS |
| | | RSGTDFTLTISSLQPEDFATYYCQQSYAAYLFT |
| | | FGQGTKVEIKRTVAAPSVFIFPPSDEQLKSGTAS |
| | | VVCLLNNFYPREAKVQWKVDNALQSGNSQESV |
| | | TEQDSKDSTYSLSSTLTLSKADYEKHKVYACEVT |
| | | HQGLSSPVTKSFNRGEC |
| N-HC appended ScFv-IgG- | L6-N-HC | L6-N-HC appended ScFv-F4-IgG-RSPO2RA-Knob- |
| mutRspo2-Knob + | appended | his HC SEQ ID NO: 144 |
| IgG-mutRspo2-Hole | ScFv-F4- | EVQLVESGGGLVQPGGSLRLSCAASGFTFTSY |
| | IgG- | YISWVRQAPGKGLEWVAEISPYSGSTYYADSV |
| | RSPO2RA- | KGRFTISADTSKNTAYLQMNSLRAEDTAVYYC |
| | Knob-his + | ALRARPPIRLHPRGSVMDYWGQGTLVTVSSGS |
| | F4-IgG- | AASGSSGGSSSGADIQMTQSPSSLSASVGDRVTIT |
| | RSPO2RA | CRASQDVSTAVAWYQQKPGKAPKLLIYSASFL |
| | Hole-Flag | YSGVPSRFSGSGSGTDFTLTISSLQPEDFATYY |
| | | CQQSYTTPPTFGQGTKVEIKGGGGSGGGGSGG |
| | | GGSEVQLVESGGGLVQPGGSLRLSCAASGFNL |
| | | SSYSMHWVRQAPGKGLEWVAYISSYYGYTYY |
| | | ADSVKGRFTISADTSKNTAYLQMNSLRAEDTA |
| | | VYYCARPAPGHWGFDYWGQGTLVTVSSASTK |
| | | GPSVFPLAPSSKSTSGGTAALGCLVKDYFPEPVT |
| | | VSWNSGALTSGVHTFPAVLQSSGLYSLSSVVTVP |
| | | SSSLGTQTYICNVNHKPSNTKVDKKVEPKSCDKT |
| | | HTCPPCPAPEAAGGPSVFLFPPKPKDTLMISRTPE |
| | | VTCVVVDVSHEDPEVKFNWYVDGVEVHNAKTK |
| | | PREEQYNSTYRVVSVLTVLHQDWLNGKEYKCK |
| | | VSNKALGAPIEKTISKAKGQPREPQVYTLPPSREE |
| | | MTKNQVSLWCLVKGFYPSDIAVEWESNGQPENN |
| | | YKTTPPVLDSDGSFFLYSKLTVDKSRWQQGNVF |
| | | SCSVMHEALHNHYTQKSLSLSPGKGGGGSGGGG |
| | | [chemical structure] |
| | | [chemical structure] |
| | | [chemical structure] |
| | | [chemical structure] |
| | | >F4-IgG-RSPO2RA-Hole Flag HC SEQ ID NO: 145 |
| | | EVQLVESGGGLVQPGGSLRLSCAASGFNLSSY |
| | | SMHWVRQAPGKGLEWVAYISSYYGYTYYADS |
| | | VKGRFTISADTSKNTAYLQMNSLRAEDTAVYY |
| | | CARPAPGHWGFDYWGQGTLVTVSSASTKGPS |
| | | VFPLAPSSKSTSGGTAALGCLVKDYFPEPVTVSW |
| | | NSGALTSGVHTFPAVLQSSGLYSLSSVVTVPSSSL |
| | | GTQTYICNVNHKPSNTKVDKKVEPKSCDKTHTC |
| | | PPCPAPEAAGGPSVFLFPPKPKDTLMISRTPEVTC |
| | | VVVDVSHEDPEVKFNWYVDGVEVHNAKTKPRE |
| | | EQYNSTYRVVSVLTVLHQDWLNGKEYKCKVSN |
| | | KALGAPIEKTISKAKGQPREPQVYTLPPSREEMT |
| | | KNQVSLSCAVKGFYPSDIAVEWESNGQPENNYK |
| | | TTPPVLDSDGSFFLVSKLTVDKSRWQQGNVFSCS |
| | | VMHEALHNHYTQKSLSLSPGKGGGGSGGGGSGG |
| | | [chemical structure] |
| | | [chemical structure] |
| | | [chemical structure] |
| | | [chemical structure] |
| | | >F4 LC SEQ ID NO: 146 |
| | | DIQMTQSPSSLSASVGDRVTITCRASQSVSSAV |
| | | AWYQQKPGKAPKLLIYSASSLYSGVPSRFSGS |
| | | RSGTDFTLTISSLQPEDFATYYCQQWYYAPITF |
| | | GQGTKVEIKRTVAAPSVFIPPSDEQLKSGTASV |
| | | VCLLNNFYPREAKVQWKVDNALQSGNSQESVTE |
| | | QDSKDSTYSLSSTLTLSKADYEKHKVYACEVTH |
| | | QGLSSPVTKSFNRGEC |
| N-HC appended ScFv-IgG- | L6-N-HC | L6-N-HC appended ScFv-F49-IgG-RSPO2RA-Knob- |
| mutRspo2-Knob + | appended | His HC SEQ ID NO: 147 |
| IgG-mutRspo2-Hole | ScFv-F49- | EVQLVESGGGLVQPGGSLRLSCAASGFTFTSY |
| | IgG- | YISWVRQAPGKGLEWVAEISPYSGSTYYADSV |
| | RSPO2RA- | KGRFTISADTSKNTAYLQMNSLRAEDTAVYYC |
| | Knob-his + | ALRARPPIRLHPRGSVMDYWGQGTLVTVSSGS |
| | F49-IgG- | AASGSSGGSSSGADIQMTQSPSSLSASVGDRVTIT |
| | RSPO2RA | CRASQDVSTAVAWYQQKPGKAPKLLIYSASFL |
| | Hole-Flag | YSGVPSRFSGSGSGTDFTLTISSLQPEDFATYY |
| | | CQQSYTTPPTFGQGTKVEIKGGGGSGGGGSGG |
| | | GGSQVQLVQSGAEVKKPGASVKVSCKASGGT |
| | | FSSYAISWVRQAPGQGLEWMGWINAGNGNTT |
| | | YAQKFQGRVTMTRDTSTSTVYMELSSLRSEDT |
| | | AVYYCARHYYGSGSYPDWGQGTLVTVSSAST |
| | | KGPSVFPLAPSSKSTSGGTAALGCLVKDYFPEPV |
| | | TVSWNSGALTSGVHTFPAVLQSSGLYSLSSVVTV |
| | | PSSSLGTQTYICNVNHKPSNTKVDKKVEPKSCDK |
| | | THTCPPCPAPEAAGGPSVFLFPPKPKDTLMISRTP |
| | | EVTCVVVDVSHEDPEVKFNWYVDGVEVHNAKT |
| | | KPREEQYNSTYRVVSVLTVLHQDWLNGKEYKC |
| | | KVSNKALGAPIEKTISKAKGQPREPQVYTLPPSRE |
| | | EMTKNQVSLWCLVKGFYPSDIAVEWESNGQPEN |
| | | NYKTTPPVLDSDGSFFLYSKLTVDKSRWQQGNV |
| | | FSCSVMHEALHNHYTQKSLSLSPGKGGGGSGGG |
| | | [chemical structure] |
| | | [chemical structure] |
| | | [chemical structure] |
| | | [chemical structure] |
| | | >F49-IgG-RSPO2RA-Hole Flag HC SEQ ID NO: 148 |
| | | QVQLVQSGAEVKKPGASVKVSCKASGGTFSSY |
| | | AISWVRQAPGQGLEWMGWINAGNGNTTYAQ |
| | | KFQGRVTMTRDTSTSTVYMELSSLRSEDTAVY |
| | | YCARHYYGSGSYPDWGQGTLVTVSSASTKGPS |
| | | VFPLAPSSKSTSGGTAALGCLVKDYFPEPVTVSW |
| | | NSGALTSGVHTFPAVLQSSGLYSLSSVVTVPSSSL |
| | | GTQTYICNVNHKPSNTKVDKKVEPKSCDKTHTC |
| | | PPCPAPEAAGGPSVFLFPPKPKDTLMISRTPEVTC |
| | | VVVDVSHEDPEVKFNWYVDGVEVHNAKTKPRE |
| | | EQYNSTYRVVSVLTVLHQDWLNGKEYKCKVSN |
| | | KALGAPIEKTISKAKGQPREPQVYTLPPSREEMT |
| | | KNQVSLSCAVKGFYPSDIAVEWESNGQPENNYK |
| | | TTPPVLDSDGSFFLVSKLTVDKSRWQQGNVFSCS |
| | | VMHEALHNHYTQKSLSLSPGKGGGGSGGGGSGG |
| | | [chemical structure] |
| | | [chemical structure] |
| | | [chemical structure] |
| | | [chemical structure] |
| | | >F49 LC SEQ ID NO: 149 |
| | | DIQMTQSPSSPSASVGDRVTITCRASQSISSYLN |
| | | WYQQKPGKAPKLLIYAASSLQSGVPSRFSGSG |
| | | SGTDFTLTISSLQPEDFATYYCQQSYSTPLTFG |
| | | GGTKVEIKRTVAAPSVFIFPPSDEQLKSGTASVV |
| | | CLLNNFYPREAKVQWKVDNALQSGNSQESVTEQ |
| | | DSKDSTYSLSSTLTLSKADYEKHKVYACEVTHQ |
| | | GLSSPVTKSFNRGEC |
| N-HC appended ScFv-IgG- | L6-N-HC | L6-N-HC appended ScFv-F10-IgG-RSPO2RA-Knob- |
| mutRspo2-Knob + | appended | His HC SEQ ID NO: 150 |
| IgG-mutRspo2-Hole | ScFv-F10- | EVQLVESGGGLVQPGGSLRLSCAASGFTFTSY |
| | IgG- | YISWVRQAPGKGLEWVAEISPYSGSTYYADSV |
| | RSPO2RA- | KGRFTISADTSKNTAYLQMNSLRAEDTAVYYC |
| | Knob-his + | ALRARPPIRLHPRGSVMDYWGQGTLVTVSSGS |
| | F10-IgG- | AASGSSGGSSSGADIQMTQSPSSLSASVGDRVTIT |
| | RSPO2RA | CRASQDVSTAVAWYQQKPGKAPKLLIYSASFL |
| | Hole-Flag | YSGVPSRFSGSGSGTDFTLTISSLQPEDFATYY |
| | | CQQSYTTPPTFGQGTKVEIKGGGGSGGGGSGG |
| | | GGSEVQLVESGGGLVQPGGSLRLSCAASGFTF |
| | | SSFNMFWVRQAPGKGLEWVAGIDDDGSYPNY |
| | | GSAVKGRATISRDNSKNTLYLQMNSLRAEDTA |
| | | VYYCAKSGYGGSWGGYIADDIDAWGQGTLVT |
| | | VSSASTKGPSVFPLAPSSKSTSGGTAALGCLVKD |
| | | YFPEPVTVSWNSGALTSGVHTFPAVLQSSGLYSL |
| | | SSVVTVPSSSLGTQTYICNVNHKPSNTKVDKKVE |
| | | PKSCDKTHTCPPCPAPEAAGGPSVFLFPPKPKDTL |
| | | MISRTPEVTCVVVDVSHEDPEVKFNWYVDGVEV |
| | | HNAKTKPREEQYNSTYRVVSVLTVLHQDWLNG |
| | | KEYKCKVSNKALGAPIEKTISKAKGQPREPQVYT |
| | | LPPSREEMTKNQVSLWCLVKGFYPSDIAVEWES |
| | | NGQPENNYKTTPPVLDSDGSFFLYSKLTVDKSR |
| | | WQQGNVFSCSVMHEALHNHYTQKSLSLSPGKG |
| | | [chemical structure] |
| | | [chemical structure] |
| | | [chemical structure] |
| | | [chemical structure] |
| | | >F10-IgG-RSPO2RA-Hole Flag HC SEQ ID NO: 151 |
| | | EVQLVESGGGLVQPGGSLRLSCAASGFTFSSF |
| | | NMRWVRQAPGKGLEWVAGIDDDGSYPNYGS |
| | | AVKGRATISRDNSKNTLYLQMNSLRAEDTAVY |
| | | YCAKSGYGGSWGGYIADDIDAWGQGTLVTVS |
| | | SASTKGPSVFPLAPSSKSTSGGTAALGCLVKDYF |
| | | PEPVTVSWNSGALTSGVHTFPAVLQSSGLYSLSS |
| | | VVTVPSSSLGTQTYICNVNHKPSNTKVDKKVEPK |
| | | SCDKTHTCPPCPAPEAAGGPSVFLFPPKPKDTLMI |
| | | SRTPEVTCVVVDVSHEDPEVKFNWYVDGVEVH |
| | | NAKTKPREEQYNSTYRVVSVLTVLHQDWLNGK |
| | | EYKCKVSNKALGAPIEKTISDKAKGQPREPQVYTL |
| | | PPSREEMTKNQVSLSCAVKGFYPSDIAVEWESNG |
| | | QPENNYKTTPPVLDSDGSFFLVSKLTVDKSRWQ |
| | | QGNVFSCSVMHEALHNHYTQKSLSLSPGKGGGG |
| | | [chemical structure] |
| | | [chemical structure] |
| | | [chemical structure] |
| | | [chemical structure] |
| | | >F10 LC SEQ ID NO: 152 |
| | | ELTQPPSVSVSPGQTARITCSGDGSYAGSYYYG |
| | | WYQQKPGQAPVTLIYYNNKRPSGIPERFSGSL |
| | | SGSTNTLTISGVQAEDEADYYCGSADNSGAAF |
| | | GGGTKLTVLRTVAAPSVFIFPPSDEQLKSGTASV |
| | | VDLLNNFYPREAKVQWKVDNALQSGNSQESVTE |
| | | QDSKDSTYSLSSTLTLSKADYEKHKVYACEVTH |
| | | QGLSSPVTKSFNRGEC |
| [chemical structure] | L6-N-HC appended ScFv- F12578-IgG- RSPO2RA- Knob-his + L6-N-HC appended ScFv- F12478-IgG- Hole-Flag | L6-N-HC appended Scfv-F12578-IgG-RSPO2RA- Knob-His HC SEQ ID NO: 153 EVQLVESGGGLVQPGGSLRLSCAASGFTFTSY YISWVRQAPGKGLEWVAEISPYSGSTYYADSV KGRFTISADTSKNTAYLQMNSLRAEDTAVYYC ALRARPPIRLHPRGSVMDYWGQGTLVTVSSGS AASGSGGSSGADIQMTQSPSSLSASVGDRVTIT CRASQDVSTAVAWYQQKPGKAPKLLIYSASFL YSGVPSRFSGSGSGTDFTLTISSLQPEDFATYY CQQSYTTPPTFGQGTKVEIKGGGGSGGGGSGG GGSEVQLVESGGGLVQPGGSLRLSCAASGFTF SHYTLSWVRQAPGKGLEWVSVISGDGSYTYY ADSVKGRFTISSDNSKNTLYLQMNSLRAEDTA VYYCARNFIKYVFANWGQGTLVTVSSASTKGP SVFPLAPSSKSTSGGTAALGCLVKDYFPEPVTVS WNSGALTSGVHTFPAVLQSSGLYSLSSVVTVPSS SLGTQTYICNVNHKPSNTKVDKKVEPKSCDKTH TCPPCPAPEAAGGPSVFLFPPKPKDTLMISRTPEV TCVVVDVSHEDPEVKFNWYDGVEVHNAKTKP REEQYNSTYRVVSVLTVLHQDWLNGKEYKCKV |
| | | SNKALGAPIEKTISKAKGQPREPQVYTLPPSREEM |
| | | TKNQVSLWCLVKGFYPSDIAVEWESNGQPENNY |
| | | KTTPPVLDSDGSFFLYSKLTVDKSRWQQGNVFSC |
| | | SVMHEALHNHYTQKSLSLSPGKGGGGSGGGGSG |
| | | [chemical structure] |
| | | [chemical structure] |
| | | [chemical structure] |
| | | [chemical structure] |
| | | >L6-N-HC appended ScFv-F12578-IgG-Hole Flag HC |
| | | SEQ ID NO: 154 |
| | | EVQLVESGGGLVQPGGSLRLSCAASGFTFTSY |
| | | YISWVRQAPGKGLEWVAEISPYSGSTYYADSV |
| | | KGRFTISADTSKNTAYLQMNSLRAEDTAVYYC |
| | | ALRARPPIRLHPRGSVMDYWGQGTLVTVSSGS |
| | | AASGSSGGSSSGADIQMTQSPSSLSASVGDRVTIT |
| | | CRASQDVSTAVAWYQQKPGKAPKLLIYSASFL |
| | | YSGVPSRFSGSGSGTDFTLTISSLQPEDFATYY |
| | | CQQSYTTPPTFGQGTKVEIKGGGGSGGGGSGG |
| | | GGSEVQLVESGGGLVQPGGSLRLSCAASGFTF |
| | | SHYTLSWVRQAPGKGLEWVSVISGDGSYTYY |
| | | ADSVKGRFTISSDNSKNTLYLQMNSLRAEDTA |
| | | VYYCARNFIKYVFANWGQGTLVTVSSASTKGP |
| | | SVFPLAPSSKSTSGGTAALGCLVKDYFPEPVTVS |
| | | WNSGALTSGVHTFPAVLQSSGLYSLSSVVTVPSS |
| | | SLGTQTYICNVNHKPSNTKVDKKVEPKSCDKTH |
| | | TCPPCPAPEAAGGPSVFLFPPKPKDTLMISRTPEV |
| | | TCVVVDVSHEDPEVKFNWYVDGVEVHNAKTKP |
| | | REEQYNSTYRVVSVLTVLHQDWLNGKEYKCKV |
| | | SNKALGAPIEKTISKAKGQPREPQVYTLPPSREEM |
| | | TKNWVSLSCAVKGFYPSDIAVEWESNGQPENNY |
| | | KTTPPVLDSDGSFFLVSKLTVDKSRWQQGNVFSC |
| | | SVMHEALHNHYTQKSLSLSPGKGSGSGDYKDDD |
| | | DK |
| | | >F12578 LC SEQ ID NO: 155 |
| | | DIELTQPPSVSVAPGQTARISCSGDNIGSFYVH |
| | | WYQQKPGQAPVLVIYDKSNRPSGIPERFSGSN |
| | | SGNTATLTISGTQAEDEADYKYCQSYANTLSLV |
| | | FGGGTKLTVLGQPKAAPSVTLFPPSSEELQANK |
| | | ATLVCLISDFYPGAVTVAWKADSSPVKAGVETT |
| | | TPSKQSNNKYASSYLSLTPEQWKSHRSYSCQVT |
| | | HEGSTVEKTVAPTECS |
| N-HC appended ScFv-IgG- | L6-N-HC | L6-N-HC appended ScFv-F127-IgG-RSPO2RA-Knob- |
| mutRspo2-Knob + | appended | His HC SEQ ID NO: 156 |
| N-HC appended ScFv-IgG- | ScFv-F127- | EVQLVESGGGLVQPGGSLRLSCAASGFTFTSY |
| Hole | IgG- | YISWVRQAPGKGLEWVAEISPYSGSTYYADSV |
| | RSPO2RA- | KGRFTISADTSKNTAYLQMNSLRAEDTAVYYC |
| | Knob-his + | ALRARPPIRLHPRGSVMDYWGQGTLVTVSSGS |
| | L6-N-HC | AASGSSGGSSSGADIQMTQSPSSLSASVGDRVTIT |
| | appended | CRASQDVSTAVAWYQQKPGKAPKLLIYSASFL |
| | ScFv-F127- | YSGVPSRFSGSGSGTDFTLTISSLQPEDFATYY |
| | IgG-Hole- | CQQSYTTPPTFGQGTKVEIKGGGGSGGGGSGG |
| | Flag | GGSEVQLVESGGGLVQPGGSLRLSCAASGFNIS |
| | | SSYIHWVRQAPGKGLEWVAYIYSSYGSTYYAD |
| | | SVKGRFTISADTSKNTAYLQMNSLRAEDTAVY |
| | | YCARASWYALDYWGQGTLVTVSSASTKGPSVF |
| | | PLAPSSKSTSGGTAALGCLVKDYFPEPVTVSWNS |
| | | GALTSGVHTFPAVLQSSGLYSLSSVVTVPSSSLGT |
| | | QTYICNVNHKPSNTKVDKKVEPKSCDKTHTCPP |
| | | CPAPEAAGGPSVFLFPPKPKDTLMISRTPEVTCVV |
| | | VDVSHEDPEVKFNWYVDGVEVHNAKTKPREEQ |
| | | YNSTYRVVSVLTVLHQDWLNGKEYKCKVSNKA |
| | | LGAPIEKTISKAKGQPREPQVYTLPPSREEMTKN |
| | | QVSLWCLVKGFYPSDIAVEWESNGQGPENNYKTT |
| | | MHEALHNHYTQKSLSLSPGKGGGGSGGGGSGGG |
| | | [chemical structure] |
| | | [chemical structure] |
| | | [chemical structure] |
| | | [chemical structure] |
| | | >L6-N-HC appended ScFv-F127-IgG-Hole Flag HC |
| | | SEQ ID NO: 157 |
| | | EVQLVESGGGLVQPGGSLRLSCAASGFTFTSY |
| | | YISWVRQAPGKGLEWVAEISPYSGSTYYADSV |
| | | KGRFTISADTSKNTAYLQMNSLRAEDTAVYYC |
| | | ALRARPPIRLHPRGSVMDYWGQGTLVTVSSGS |
| | | AASGSSGGSSSGADIQMTQSPSSLSASVGDRVTIT |
| | | CRASQDVSTAVAWYQQKPGKAPKLLIYSASFL |
| | | YSGVPSRFSGSGSGTDFTLTISSLQPEDFATYY |
| | | CQQSYTTPPTFGQGTKVEIKGGGGSGGGGSGG |
| | | GGSEVQLVESGGGLVQPGGSLRLSCAASGFNIS |
| | | SSYIHWVRQAPGKGLEWVAYIYSSYGSTYYAD |
| | | SVKGRFTISADTSKNTAYLQMNSLRAEDTAVY |
| | | YCARASWYALDYWGQGTLVTVSSASTKGPSVF |
| | | PLAPSSKSTSGGTAALGCLVKDYFPEPVTVSWNS |
| | | GALTSGVHTFPAVLQSSGLYSLSSVVTVPSSSLGT |
| | | QTYICNVNHKPSNTKVDKKVEPKSCDKTHTCPP |
| | | CPAPEAAGGPSVFLFPPKPKDTLMISRTPEVTCVV |
| | | VDVSHEDPEVKFNWYVDGVEVHNAKTKPREEQ |
| | | YNSTYRVVSVLTVLHQDWLNGKEYKCKVSNKA |
| | | LGAPIEKTISKAKGQPREPQVYTLPPSREEMTKN |
| | | QVSLSCAVKGFYPSDIAVEWESNGQPENNYKTTP |
| | | PVLDSDGSFFLVSKLTVDKSRWQQGNVFSCSVM |
| | | HEALHNHYTQKSLSLSPGKGSGSGDYKDDDDK |
| | | >F127 LC SEQ ID NO: 158 |
| | | DIQMTQSPSSLSASVGDRVTITCRASQSVSSAV |
| | | AWYQQKPGKAPKLLIYSASSLYSGVPSRFSGS |
| | | RSGTDFTLTISSLQPEDFATYYCQQYWYGVAP |
| | | ITFGQGTKVEIKRTVAAPSVFIFPPSDEQLKSGT |
| | | ASVVCLLNNFYPREAKVQWKVDNALQSGNSQE |
| | | SVTEQDSKDSTYSLSSTLTLSKADYEKHKVYACE |
| | | VTHQGLSSPVTKSFNRGEC |
| N-HC appended ScFc-IgG- | L6-N-HC | L6-N-HC appended ScFv-F58-IgG-RSPO2RA-Knob- |
| mutRspo2-Knob + | appended | his HC SEQ ID NO: 159 |
| N-HC appended ScFv-IgG- | ScFv-F58 | EVQLVESGGGLVQPGGSLRLSCAASGFTFTSY |
| Hole | IgG- | YISWVRQAPGKGLEWVAEISPYSGSTYYADSV |
| | RSPO2RA- | KGRFTISADTSKNTAYLQMNSLRAEDTAVYYC |
| | Knob-his + | ALRARPPIRLHPRGSVMDYWGQGTLVTVSSGS |
| | L6-N-HC | AASGSSGGSSSGADIQMTQSPSSLSASVGDRVTIT |
| | appended | CRASQDVSTAVAWYQQKPGKAPKLLIYSASFL |
| | ScFv-F58- | YSGVPSRFSGSGSGTDFTLTISSLQPEDFATYY |
| | IgG-Hole | CQQSYTTPPTFGQGTKVEIKGGGGSGGGGSGG |
| | Flag | GGSEVQLVESGGGLVQPGGSLRLSCAASGFNIS |
| | | YSYIHWVRQAPGKGLEWVASIYSSSGSTSYAD |
| | | SVKGRFTISADTSKNTAYLQMNSLRAEDTAVY |
| | | YCARGAIDYWGQGTLVTVSSASTKGPSVFPLAP |
| | | SSKSTSGGTAALGCLVKDYFPEPVTVSWNSGALT |
| | | SGVHTFPAVLQSSGLYSLSSVVTVPSSSLGTQTYI |
| | | CNVNHKPSNTKVDKKVEPKSCDKTHTCPPCPAP |
| | | EAAGGPSVFLFPPKPKDTLMISRTPEVTCVVVDV |
| | | SHEDPEVKFNWYVDGVEVHNAKTKPREEQYNS |
| | | TYRVVSVLTVLHQDWLNGKEYKCKVSNKALGA |
| | | PIEKTISKAKGQPREPQVYTLPPSREEMTKNQVSL |
| | | WCLVKGFYPSDIAVEWESNGQPENNYKTTPPVL |
| | | DSDGSFFLYSKLTVDKSRWQQGNVFSCSVMHEA |
| | | [chemical structure] |
| | | [chemical structure] |
| | | [chemical structure] |
| | | [chemical structure] |
| | | [chemical structure] |
| | | >L6-N-HC appended ScFv-F58-IgG-Hole Flag HC |
| | | SEQ ID NO: 160 |
| | | EVQLVESGGGLVQPGGSLRLSCAASGFTFTSY |
| | | YISWVRQAPGKGLEWVAEISPYSGSTYYADSV |
| | | KGRFTISADTSKNTAYLQMNSLRAEDTAVYYC |
| | | ALRARPPIRLHPRGSVMDYWGQGTLVTVSSGS |
| | | AASGSSGGSSSGADIQMTQSPSSLSASVGDRVTIT |
| | | CRASQDVSTAVAWYQQKPGKAPKLLIYSASFL |
| | | YSGVPSRFSGSGSGTDFTLTISSLQPEDFATYY |
| | | CQQSYTTPPTFGQGTKVEIKGGGGSGGGGSGG |
| | | GGSEVQLVESGGGLVQPGGSLRLSCAASGFNIS |
| | | YSYIHWVRQAPGKGLEWVASIYSSSGSTSYAD |
| | | SVKGRFTISADTSKNTAYLQMNSLRAEDTAVY |
| | | YCARGAIDYWGQGTLVTVSSASTKGPSVFPLAP |
| | | SSKSTSGGTAALGCLVKDYFPEPVTVSWNSGALT |
| | | SGVHTFPAVLQSSGLYSLSSVVTVPSSSLGTQTYI |
| | | CNVNHKPSNTKVDKKVEPKSCDKTHTCPPCPAP |
| | | EAAGGPSVFLFPPKPKDTLMISRTPEVTCVVVDV |
| | | SHEDPEVKFNWYVDGVEVHNAKTKPREEQYNS |
| | | TYRVVSVLTVLHQDWLNGKEYKCKVSNKALGA |
| | | PIEKTISKAKGQPREPQVYTLPPSREEMTKNQVSL |
| | | SCAVKGFYPSDIAVEWESNGQPENNYKTTPPVLD |
| | | SDGSFFLVSKLTVDKSRWQQGNFSCSVMHEAL |
| | | HNHYTQKSLSLSPGKGSGSGDYKDDDDK |
| | | >F58 LC SEQ ID NO: 161 |
| | | DIQMTQSPSSLSASVGDRVTITCRASQSVSSAV |
| | | AWYQQKPGKAPKLLIYSASSLYSGVPSRFSGS |
| | | RSGTDFTLTISSLQPEDFATYYCQQWYSSGHV |
| | | LITFGQGTKVEIKRTVAAPSVFIFPPSDEQLKSGT |
| | | ASVVCLLNNFYPREAKVQWKVDNALQSGANQE |
| | | SVTEQDSKDSTYSLSSTLTLSKADYEKHKVYACE |
| | | VTHQGLSSPVTKSFNRGEC |
| N-HC appended ScFc-IgG- | L6-N-HC | L6-N-HC appended ScFv-F4-2-IgG-RSPO2RA-Knob- |
| mutRspo2-Knob + | appended | His HC SEQ ID NO: 162 |
| N-HC appended ScFv-IgG- | ScFv-F4-2- | EQVLVESGGGLVQPGGSLRLSCAASGFTFTSY |
| Hole | IgG- | YISWVRQAPGKGLEWVAEISPYSGSTYYADSV |
| | RSPO2RA- | KGRFTISADTSKNTAYLQMNSLRAEDTAVYYC |
| | Knob-his + | ALRARPPIRLHPRGSVMDYWGQGTLVTVSSGS |
| | L6-N-HC | AASGSSGGSSSGADIQMTQSPSSLSASVGDRVTIT |
| | appended | CRASQDVSTAVAWYQQKPGKAPKLLIYSASFL |
| | ScFv-F4-2- | YSGVPSRFSGSGSGTDFTLTISSLQPEDFATYY |
| | IgG-Hole- | CQQSYTTPPTFGQGTKVEIKGGGGSGGGGSGG |
| | Flag | GGSEVQLVESGGGLVQPGGSLRLSCAASGFNIS |
| | | YYYIHWVRQAPGKGLEWVASIYPSSGYTYYA |
| | | DSVKGRFTISADTSKNTAYLQMNSLRAEDTAV |
| | | YYCARSSFYWAMDYWGQGTLVTVSSASTKGP |
| | | SVFPLAPSSKSTSGGTAALGCLVDKYFPEPVTVS |
| | | WNSGALTSGVHTFPAVLQSSGLYSLSSVVTVPSS |
| | | SLGTQTYICNVNHKPSNTKVDKKVEPKSCDKTH |
| | | TCPPCPAPEAAGGPSVFLFPPKPKDTLMISRTPEV |
| | | TCVVVDVSHEDPEVKFNWYVDGVEVHNAKTKP |
| | | REEQYNSTYRVVSVLTVLHQDWLNGKEYKCKV |
| | | SNKALGAPIEKTISKAKGQPREPQVYTLPPSREEM |
| | | TKNQVSLWCLVKGFYPSDIAVEWESNGQPENNY |
| | | KTTPPVLDSDGSFFLYSKLTVDKSRWQQGNVFSC |
| | | SVMHEALHNHYTQKSLSLSPGKGGGGSGGGGSG |
| | | [chemical structure] |
| | | [chemical structure] |
| | | [chemical structure] |
| | | [chemical structure] |
| | | >L6-N-HC appended ScFv-F4-2-IgG-Hole Flag HC |
| | | SEQ ID NO: 163 |
| | | EVQLVESGGGLVQPGGSLRLSCAASGFTFTSY |
| | | YISWVRQAPGKGLEWVAEISPYSGSTYYADSV |
| | | KGRFTISADTSKNTAYLQMNSLRAEDTAVYYC |
| | | ALRARPPIRLHPRGSVMDYWGQGTLVTVSSGS |
| | | AASGSSGGSSSGADIQMTQSPSSLSASVGDRVTIT |
| | | CRASQDVSTAVAWYQQKPKAPKLLIYSASFL |
| | | YSGVPSRFSGSGSGTDFTLTISSLQPEDFATYY |
| | | CQQSYTTPPTFGQGTKVEIKGGGGSGGGGSGG |
| | | GGSEVQLVESGGGLVQPGGSLRLSCAASGFNIS |
| | | YYYIHWVRQAPGKGLEWVASIYPSSGYTYYA |
| | | DSVKGRFTISADTSKNTAYLQMNSLRAEDTAV |
| | | YYCARSSFYWAMDYWGQGTLVTVSSASTKGP |
| | | SVFPLAPSSKSTSGGTAALGCLVKDYFPEPVTVS |
| | | WNSGALTSGVHTFPAVLQSSGLYSLSSVVTVPSS |
| | | SLGTQTYICNVNHKPSNTKVDDVEPKSCDKTH |
| | | TCPPCPAPEAAGGPSVFLFPPKPKDTLMISRTPEV |
| | | TCVVVDVSHEDPEVKFNWYVDGVEVHNAKTKP |
| | | REEQYNSTYRVVSVLTVLHQDWLNGKEYKCKV |
| | | SNKALGQPIEKTISKAKGQPREPQVYTLPPSREEM |
| | | TKNQVSLSCAVKGFYPSDIAVEWESNGQPENNY |
| | | KTTPPVLDSDGSFFLVSKLTVDKSRWQQGNVFSC |
| | | SVMHEALHNHYTQKSLSLSPGKGSGSGDYKDDD |
| | | DK |
| | | >F4-2 LC SEQ ID NO: 164 |
| | | DIQMTQSPSSLSASVGDRVTITCRASQSVSSAV |
| | | AWYQQKPGKAPKLLIYSASSLYSGVPSRFSGS |
| | | RSGTDFTLTISSLQPEDFATYYCQQSYAAYLFT |
| | | FGQGTKVEIKRTVAAPSVFIFPPSDEQLKSGTAS |
| | | VVCLLNNFYPREAKVQWKVDNALQSGNSQESV |
| | | TEQDSKDSTYSLSSTLTLSKADYEKHKVYACEVT |
| | | HQGLSSPVTKSFNRGEC |
| N-HC appended ScFv-IgG- | L6-N-HC | L6-N-HC appended ScFv-F4-IgG-RSPO2RA-Knob- |
| mutRspo2-Knob + | appended | His HC SEQ ID NO: 165 |
| N-HC appended ScFv-IgG- | ScFv-F4- | EVQLVESGGGLVQPGGSLRLSCAASGFTFTSYL |
| Hole | IgG- | YISWVRQAPGKGLEWVAEISPYSGSTYYADSV |
| | RSPO2RA- | KGRFTISADTSKNTAYLQMNSLRAEDTAVYYC |
| | Knob-his + | ALRARPPIRLHPRGSVMDYWGQGTLVTVSSGS |
| | L6-N-HC | AASGSSGGSSSGADIQMTQSPSSLSASVGDRVTIT |
| | appended | CRASQDVSTAVAWYQQKPGKAPKLLIYSASFL |
| | ScFv-F4- | YSGVPSRFSGSGSGTDFTLTISSLQPEDFATYY |
| | IgG-Hole | CQQSYTTPPTFGQGTKVEIKGGGGSGGGGSGG |
| | Flag | GGSEVQLVESGGGLVQPGGSLRLSCAASGFNL |
| | | SSYSMHWVRQAPGKGLEWVAYISSYYGYTYY |
| | | ADSVKGRFTISADTSKNTAYLQMNSLRAEDTA |
| | | VYYCARPAPGHWGFDYWGQGTLVTVSSASTK |
| | | GPSVFPLAPSSKSTSGGTAALGCLVKDYFPEPVT |
| | | VSWNSGALTSGVHTFPAVLQSSGLYSLSSVVTVP |
| | | SSSLGTQTYICNVNHKPSNTKVDKKVEPKSCDKT |
| | | HTCPPCPAPEAAGGPSVFLFPPKPKDTLMISRTPE |
| | | VTCVVVDVSHEDPEVKFNWYVDGVEVHNAKTK |
| | | PREEQYNSTYRVVSVLTVLHQDWLNGKEYKCK |
| | | VSNKALGAPIEKTISKAKGQPREPQVYTLPPSREE |
| | | MTKNQVSLWCLVKGFYPSDIAVEWESNGQPENN |
| | | YKTTPPVLDSDGSFFLYSKLTVDKSRWQQGNVF |
| | | SCSVMHEALHNHYTQKSLSLSPGKGGGGSGGGG |
| | | [chemical structure] |
| | | [chemical structure] |
| | | [chemical structure] |
| | | [chemical structure] |
| | | >L6-N-HC appended ScFv-F4-IgG-Hole Flag HC |
| | | SEQ ID NO: 166 |
| | | EVQLVESGGGLVQPGGSLRLSCAASGFTFTSY |
| | | YISWVRQAPGKGLEWVAEISPYSGSTYYADSV |
| | | KGRFTISADTSKNTAYLQMNSLRAEDTAVYYC |
| | | ALRARPPIRLHPRGSVMDYWGQGTLVTVSSGS |
| | | AASGSSGGSSSGADIQMTQSPSSLSASVGDRVTIT |
| | | CRASQDVSTAVAWYQQKPGKAPKLLIYSASFL |
| | | YSGVPSRFSGSGSGTDFTLTISSLQPEDFATYY |
| | | CQQSYTTPPTFGQGTKVEIKGGGGSGGGGSGG |
| | | GGSEVQLVESGGGLVQPGGSLRLSCAASGFNL |
| | | SSYSMHWVRQAPGKGLEWVAYISSYYGYTYY |
| | | ADSVKGRFTISADTSKNTAYLQMNSLRAEDTA |
| | | VYYCARPAPGHWGFDYWGQGTLVTVSSASTK |
| | | GPSVFPLAPSSKSTSGGTAALGCLVKDYFPEPVT |
| | | VSWNSGALTSGVHTFPAVLQSSGLYSLSSVVTVP |
| | | SSSLGTQTYICNVNHKPSNTKVDKKVEPKSCDKT |
| | | HTCPPCPAPEAAGGPSVFLFPPKPKDTLMISRTPE |
| | | VTCVVVDVSHEDPEVKFNWYVDGVEVHNAKTK |
| | | PREEQYNSTYRVVSVLTVLGQDWLNGKEYKCK |
| | | VSNKALGAPIEKTISKAKGQPREPQVYTLPPSREE |
| | | MTKNQVSLSCAVKGFYPSDIAVEWESNGQPENN |
| | | YKTTPPVLDSDGSFFLVSKLTVDKSRWQQGNVF |
| | | SCSVMHEALHNHYTQKSLSLSPGKGSGSGDYKD |
| | | DDDK |
| | | >F4 LC SEQ ID NO: 167 |
| | | DIQMTQSPSSLSASVGDRVTITCRASQSVSSAV |
| | | AWYQQKPGKAPKLLIYSASSLYSGVPSRFSGS |
| | | RSGTDFTLTISSLQPEDFATYYCQQWYYAPITF |
| | | GQGTKVEIKRTVAPPSVFIFPPSDEQLKSGTASV |
| | | VCLLNNFYPREAKVQWKVDNALQSGNSQESVTE |
| | | QDSKDSTYSLSSTLTLSKADYEKHKVYACEVTH |
| | | QGLSSPVTKSFNRGEC |
| N-HC appended ScFv-IgG- | L6-N-HC | L6-N-HC appended ScFv-F49-IgG-RSPO2RA-Knob- |
| mutRspo2-Inob + | appended | His HC SEQ ID NO: 168 |
| N-HC appended ScFv-IgG- | ScFv-F49- | EQQLVESGGGLVQPGGSLRLSCAASGFTFTSY |
| Hole | IgG- | YISWVRQAPGKGLEWVAEISPYSGSTYYADSV |
| | RSPO2RA- | KGRFTISADTSKNTAYLQMNSLRAEDTAVYYC |
| | Knob-his + | ALRARPPIRLHPRGSVMDYWGQGTLVTVSSGS |
| | L6-N-HC | AASGSSGGSSSGADIQMTQSPSSLSASVGDRVTIT |
| | appended | CRASQDVSTAVAWYQQKPGKAPKLLIYSASFL |
| | ScFv-F49- | YSGVPSRFSGSGSGTDFTLTISSLQPEDFATYY |
| | IgG-Hole- | CQQSYTTPPTFGQGTKVEIKGGGGSGGGGSGG |
| | Flag | GGSQVQLVQSGAEVKKPGASVKVSCKASGGT |
| | | FSSYAISWVRQAPGQGLEWMGWINAGNGNTT |
| | | YAQKFQGRVTMTRDTSTSTVYMELSSLRSEDT |
| | | AVYYCARHYYGSGSYPDWGQGTLVTVSSAST |
| | | KGPSVFPLAPSSKSTSGGTAALGCLVKDYFPEPV |
| | | TVSWNSGALTSGVHTFPAVLQSSGLYSLSSVVTV |
| | | PSSSLGTQTYICNVNHKPSNTKVDKKVEPKSCDK |
| | | THTCPPCPAPEAAGGPSVFLFPPKPKDTLMISRTP |
| | | EVTCVVVDVSHEDPEVKFNWYVDGVEVHNAKT |
| | | KPREEQYNSTYRVVSVLTVLHQDWLNGKEYKC |
| | | KVSNKALGAPIEKTISKAKGQPREPQVYTLPPSRE |
| | | EMTKNQVSLWCLVKGFYPSDIAVEWESNGQPEN |
| | | NYKTTPPVLDSDGSFFLYSKLTVDKSRWQQGNV |
| | | FSCSVMHEALHNHYTQKSLSLSPGKGGGGSGGG |
| | | [chemical structure] |
| | | [chemical structure] |
| | | [chemical structure] |
| | | [chemical structure] |
| | | >L6-N-HC appended ScFv-F49-IgG-Hole Flag HC |
| | | SEQ ID NO: 169 |
| | | EVQLVESGGGLVQPGGSLRLSCAASGFTFTSY |
| | | YISWVRQAPGKGLEWVAEISPYSGSTYYADSV |
| | | KGRFTISADTSKNTAYLQMNSLRAEDTAVYYC |
| | | ALRARPPIRLHPRQSVMDYWGQGTLVTVSSGS |
| | | AASGSSGGSSSGADIQMTQSPSSLSASVGDRVTIT |
| | | CRASQDVSTAVAWYQQKPGKAPKLLIYSASFL |
| | | YSGVPSRFSGSGSGTDFTLTISSLQPEDFATYY |
| | | CQQSYTTPPTFGQGTKVEIKGGGGSGGGGSGG |
| | | GGSQVQLVQSGAEVKKPGASVKVSCKASGGT |
| | | FSSYAISWVRQAPGQGLEWMGWINAGNGNTT |
| | | YAQKFQGRVTMTRDTSTSTVYMELSSLRSEDT |
| | | AVYYCARHYYGSGSYPDWGQGTLVTVSSAST |
| | | KGPSVFPLAPSSKSTSGGTAALGCLVKDYFPEPV |
| | | TVSWNSGALTSGVHTFPAVLQSSGLYSLSSVVTV |
| | | PSSSLGTQTYICNVNHKPSNTKVDKKVEPKSCDK |
| | | THTCPPCPAPEAAGGPSVFLFPPKPKDTLMISRTP |
| | | EVTCVVVDVSHEDPEVKFNWYVDGVEVHNAKT |
| | | KPREEQYNSTYRVVSVLTVLHQDWLNGKEYKC |
| | | KVSNKALGAPIEKTISKAKGQPREPQVYTLPPSRE |
| | | EMTKNQVSLSCAVKGFYPSDIAVEWESNGQPEN |
| | | NYKTTPPVLDSDGSFFLVSKLTVDKSRWQQGNV |
| | | FSCSVMHEALHNHYTQKSLSLSPGKGSGSGDYK |
| | | DDDK |
| | | >F49 LC SEQ ID NO: 170 |
| | | DIQMTQSPSSPSASVGDRVTITCRASQSISSYLN |
| | | WYQQKPGKAPKLLIYAASSLQSGVPSRFSGSG |
| | | SGTDFTLTISSLQPEDFATYYCQQSYSTPLTFG |
| | | GGTKVEIKRTVAAPSVFIFPPSDEQLKSGTASVV |
| | | CLLNNFYPREAKVQWKVDNALQSGNSQESVTEQ |
| | | DSKDSTYSLSSTLTLSKADYEKHKVYACEVTHQ |
| | | GLSSPVTKSFNRGEC |
| N-HC appended ScFv-IgG- | L6-N-HC | L6-N-HC appended ScFv-F10-IgG-RSPO2RA-Knob- |
| mutRspo2-Knob + | appended | His HC SEQ ID NO: 171 |
| N-HC appended Scfv-IgG- | ScFv-F10- | EVQLVESGGGLVQPGGSLRLSCAASGFTFTSY |
| Hole | IgG- | YISWVRQAPGKGLEWVAEISPYSGSTYYADSV |
| | RSPO2RA- | KGRFTISADTSKNTAYLQMNSLRAEDTAVYYC |
| | Knob-his + | ALRARPPIRLHPRGSVMDYWGQGTLVTVSSGS |
| | L6-N-HC | AASGSSGGSSSGADIQMTQSPSSLSASVGDRVTIT |
| | appended | CRASQDVSTAVAWYQQKPGKAPKLLIYSASFL |
| | ScFv-F10- | YSGVPSRFSGSGSGTDFTLTISSLQPEDFATYY |
| | IgG-Hole- | CQQSYTTPPTFGQGTKVEIKGGGGSGGGGSGG |
| | Flag | GGSEVQLVESGGGLVQPGGSLRLSCAASGFTF |
| | | SSFNMFWVRQAPGKGLEWVAGIDDDGSYPNY |
| | | GSAVKGRATISRDNSKNTLYLQMNSLRAEDTA |
| | | VYYCAKSGYGGSWGGYIADDIDAWGQGTLVT |
| | | VSSASTKGPSVFPLAPSSKSTSGGTAALGCLVKD |
| | | YFPEPVTVSWNSGALTSGVHTFPAVLQSSGLYSL |
| | | SSVVTVPSSSLGTQTYICNVNHKPSNTKVDKKVE |
| | | PKSCDKTHTCPPCPAPEAAGGPSVFLFPPKPKDTL |
| | | MISRTPEVTCVVVDVSHEDPEVKFNWYDGVEV |
| | | HNAKTKPREEQYNSTYRVVSVLTVLHQDWLNG |
| | | KEYKCKVSNKALGAPIEKTISKAKGQPREPQVYT |
| | | LPPSREEMTKNQVSLWCLVKGFYPSDIAVEWES |
| | | NGQPENNYKTTPPVLDSDGSFFLYSKLTVDKSR |
| | | WQQGNVFSCSVMHEALHNHYTQKSLSLSPGKG |
| | | GGGSGGGGSGGGGSNPICKGCLSCSKDNGCSRC |
| | | [chemical structure] |
| | | [chemical structure] |
| | | [chemical structure] |
| | | >L6-N-HC appended ScFv-F10-IgG-Hole Flag HC |
| | | SEQ ID NO: 172 |
| | | EVQLVESGGGLVQPGGSLRLSCAASGFTFTSY |
| | | YISWVRQAPGKGLEWVAEISPYSGSTYYADSV |
| | | KGRFTISADTSKNTAYLQMNSLRAEDTAVYYC |
| | | ALRARPPIRLHPRGSVMDYWGQGTLVTVSSGS |
| | | AASGSSGGSSSGADIQMTQSPSSLSASVGDRVTIT |
| | | CRASQDVSTAVAWYQQKPGKAPKLLIYSASFL |
| | | YSGVPSRFSGSGSGTDFTLTISSLQPEDFATYY |
| | | CQQSYTTPPTFGQGTKVEIKGGGGSGGGGSGG |
| | | GGSEVQLVESGGGLVQPGGSLRLSCAASGFTF |
| | | SSFNMFWVRQAPGKGLEWVAGIDDDGSYPNY |
| | | GSAVKGRATISRDNSKNTLYLQMNSLRAEDTA |
| | | VYYCAKSGYGGSWGGYIADDIDAWGQGTLVT |
| | | VSSASTKGPSVFPLAPSSKSTSGGTAALGCLVDK |
| | | YFPEPVTVSWNSGALTSGVHTFPAVLQSSGLYSL |
| | | SSVVTVPSSSLGTQTYICNVNHKPSNTKVDKKVE |
| | | PKSCDKTHTCPPCPAPEAAGGPSVFLFPPKPKDTL |
| | | MISRTPEVTCVVVDVSHEDPEVKFNWYVDGVEV |
| | | HNAKTKPREEQYNSTYRVVSVLTVLHQDWLNG |
| | | KEYKCKVSNKALGAPIEKTISKAKGQPREPQVYT |
| | | LPPSREEMTKNQVSLSCAVKGFYPSDIAVEWESN |
| | | GQPENNYKTTPPVLDSDGSFFLVSKLTVDKSRW |
| | | QQGNVFSCSVMHEALHNHYTQKSLSLSPGKGSG |
| | | SGDYKDDDDK |
| | | >F10 LC SEQ ID NO: 173 |
| | | ELTQPPSVSVSPGQTARITCSGDGSYAGSYYYG |
| | | WYQQKPGQAPVTLIYYNNKRPSGIPERFSGSL |
| | | SGSTNTLTISGVQAEDEADYYCGSADNSGAAF |
| | | GGGTKLTVLRTVAAPSVFIPPSDEQLKSGTASV |
| | | VCLLNNFYPREAKVQWKVDNALQSGNSQESVTE |
| | | QDSKDSTYSLSSTLTLSKADYEKHKVYACEVTH |
| | | QGLSSPVTKSFNRGEC |
| [chemical structure] | L6-N-HC appended ScFv- F12578-IgG- RSPO2RA- Knob-his + F12578-IgG- Hole-Flag | L6-N-HC appended ScFv-F12578-IgG-RSPO2RA- Knob-His HC SEQ ID NO: 174 EVQLVESGGGLVQPGGSLRLSCAASGFTFTSY YISWVRQAPGKGLEWVAEISPYSGSTYYADSV KGRFTISADTSKNTAYLQMNSLRAEDTAVYYC ALRARPPIRLHPRGSVMDYWGQGTLVTVSSGS AASGSSGGSSSGADIQMTQSPSSLSASVGDRVTIT CRASQDVSTAVAWYQQKPGKAPKLLIYSASFL YSGVPSRFSGSGSGTDFTLTISSLQPEDFATYY CQQSYTTPPTFGQGTKVEIKGGGGSGGGGSGG GGSEVQLVESGGGLVQPGGSLRLSCAASGFTF SHYTLSWVRQAPGKGLEWVSVISGDGSYTYY ADSVKGRFTISSDNSKNTLYLQMNSLRAEDTA VYYCARNFIKYVFANWGQGTLVTVSSASTKGP |
| | | SVFPLAPSSKSTSGGTAALGCLVKDYFPEPVTVS |
| | | WNSGALTSGVHTFPAVLQSSGLYSLSSVVTVPSS |
| | | SLGTQTYICNVNHKPSNTKVDKKVEPKSCDKTH |
| | | TCPPCPAPEAAGGPSVFLFPPKPKDTLMISRTPEV |
| | | TCVVVDVSHEDPEVKFNWYVDGVEVHNAKTKP |
| | | REEQYNSTYRVVSVLTVLHQDWLNGKEYKCKV |
| | | SNKALGAPIEKTISKAKGQPREPQVYTLPPSREEM |
| | | TKNQVSLWCLVKGFYPSDIAVEWESNGQPENNY |
| | | KTTPPVLDSDGSFFLYSKLTVDKSRWQQGNVFSC |
| | | SVMHEALHNHYTQKSLSLSPGKGGGGSGGGGSG |
| | | [chemical structure] |
| | | [chemical structure] |
| | | [chemical structure] |
| | | [chemical structure] |
| | | >F12578-IgG-Hole Flag HC SEQ ID NO: 175 |
| | | EVQLVESGGGLVQPGGSLRLSCAASGFTFSHY |
| | | TLSWVRQAPGKGLEWVSVISGDGSYTYYADS |
| | | VKGRFTISSDNSKNTLYLQMNSLRAEDTAVYY |
| | | CARNFIKYVFANWGQGTLVTVSSASTKGPSVFP |
| | | LAPSSKSTSGGTAALGCLVKDYFPEPVTVSWNSG |
| | | ALTSGVHTFPAVLQSSGLYSLSSVVTVPSSSLGTQ |
| | | TYICNVNHKPSNTKVDKKVEPKSCDKTHTCPPCP |
| | | APEAAGGPSVFLFPPKPKDTLMISRTPEVTCVVV |
| | | DVSHEDPEVKFNWYVDGVEVHNAKTKPREEQY |
| | | NSTYRVVSVLTVLHQDWLNGKEYKCKVSNKAL |
| | | GAPIEKTISKAKGQPREPQVYTLPPSREEMTKNQ |
| | | VSLSCAVKGFYPSDIAVEWESNGQPENNYKTTPP |
| | | VLDSDGSFFLVSKLTVDKSRWQQGNVFSCSVMH |
| | | EALHNHYTQKSLSLSPGKGSGSGDYKDDDDK |
| | | >F12578 LC SEQ ID NO: 176 |
| | | DIELTQPPSVSVAPGQTARISCSGDNIGSFYVH |
| | | WYQQKPGQAPVLVIYDKSNRPSGIPERFSGSN |
| | | SGNTATLTISGTQAEDEADYYCQSYANTLSLV |
| | | FGGGTKLTVLGQPKAAPSVTLFPPSSEELQANK |
| | | ATLVCLISDFYPGAVTVAWKADSSPVKAGVETT |
| | | TPSKQSNNKYAASSYLSLTPEQWKSHRSYSCQVT |
| | | HEGSTVEKTVAPTECS |
| | L6-N-HC | L6-N-HC appended ScFv-F127-IgG-RSPO2RA-Knob- |
| | appended | His HC SEQ ID NO: 1199 |
| | ScFv-F127- | EVQLVESGGGLVQPGGSLRLSCAASGFTFTSY |
| | IgG- | YISWVRQAPGKGLEWVAEISPYSGSTYYADSV |
| | RSPO2RA- | KGRFTISADTSKNTAYLQMNSLRAEDTAVYYC |
| | Knob-his + | ALRARPPIRLHPRGSVMDYWGQGTLVTVSSGS |
| | F127-IgG- | AASGSSGGSSSGADIQMTQSPSSLSASVGDRVTIT |
| | Hole-Flag | CRASQDVSTAVAWYQQKPGKAPKLLIYSASFL |
| | | YSGVPSRFSGSGSGTDFTLTISSLQPEDFATYY |
| | | CQQSYTTPPTFGQGTKVEIKGGGGSGGGGSGG |
| | | GGSEVQLVESGGGLVQPGGSLRLSCAASGFNIS |
| | | SSYIHWVRQAPGKGLEWVAYIYSSYGSTYYAD |
| | | SVKGRFTISADTSKNTAYLQMNSLRAEDTAVY |
| | | YCARASWYALDYWGQGTLVTVSSASTKGPSVF |
| | | PLAPSSKSTSGGTAALGCLVKDYFPEPVTVSWNS |
| | | GALTSGVHTFPAVLQSSGLYSLSSVVTVPSSSLGT |
| | | QTYICNVNHKPSNTKVDKKVEPKSCDKTHTCPP |
| | | CPAPEAAGGPSVFLFPPKPKDTLMISRTPEVTCVV |
| | | VDVSHEDPEVKFNWYVDGVEVHNAKTKPREEQ |
| | | YNSTYRVVSVLTVLHQDWLNGKEYKCKVSNKA |
| | | LGAPIEKTISKAKGQPREPQVYTLPPSREEMTKN |
| | | QVSLWCLVKGFYPSDIAVEWESNGQPENNYKTT |
| | | PPVLDSDGSFFLYSKLTVDKSRWQQGNVFSCSV |
| | | MHEALHNHYTQKSLSLSPGKGGGGSGGGGSGGG |
| | | [chemical structure] |
| | | [chemical structure] |
| | | [chemical structure] |
| | | [chemical structure] |
| | | >F127-IgG-Hole Flag HC SEQ ID NO: 200 |
| | | EVQLVESGGGLVQPGGSLRLSCAASGFNISSSY |
| | | IHWVRQAPGKGLEWVAYIYSSYGSTYYADSV |
| | | KGRFTISADTSKNTAYLQMNSLRAEDTAVYYC |
| | | ARASWYALDYWGQGTLVTVSSASTKGPSVFPL |
| | | APSSKSTSGGTAALGGLVKDYFPEPVTVSWNSG |
| | | ALTSGVHTFPAVLQSSGLYSLSSVVTVPSSSLGTQ |
| | | TYICNVNHKPSNTKVDKKVEPKSCDKTHTCPPCP |
| | | APEAAGGPSVFLFPPKPKDTLMISRTPEVTCVVV |
| | | DVSHEDPEVKFNWYVDGVEVHNAKTKPREEQY |
| | | NSTYRVVSVLTVLHQDWLNGKEYKCKVSNKAL |
| | | GAPIEKTISKAKGQPREPQVYTLPPSREEMTKNQ |
| | | VSLSCAVKGFYPSDIAVEWESNGQPENNYKTTPP |
| | | VLDSDGSFFLVSKLTVDKSRWQQGNFSCSVMH |
| | | EALHNHYTQKSLSLSPGKGSGSDYKDDDDK |
| | | >F127 LC SEQ ID NO: 201 |
| | | DIQMTQSPSSLSASVGDRVTITCRASQSVSSAV |
| | | AWYQQKPGKAPKLLIYSASSLYSGVPSRFSGS |
| | | RSGTDFTLTISSLQPEDFATYYCQQYWYGVAP |
| | | ITFGQGTKVEIKRTVAAPSVFIFPPSDEQLKSGT |
| | | ASVVCLLNNFYPREAKVQWKVDNALQSGNSQE |
| | | SVTEQDSKDSTYSLSSTLTLSKADYEKHKVYACE |
| | | VTHQGLSSPVTKSFNRGEC |
| | L6-N-HC | L6-N-HC appended ScFv-F58-IgG-RSPO2RA-Inob- |
| | appended | His HC SEQ ID NO: 202 |
| | ScFv-F58- | EVQLVESGGGLVQPGGSLRLSCAASGFTFTSY |
| | IgG- | YISWVRQAPGKGLEWVAEISPYSGSTYYADSV |
| | RSPO2RA- | KGRFTISADTSKNTAYLQMNSLRAEDTAVYYC |
| | Knob-his + | ALRARPPIRLHPRGSVMDYWGQGTLVTVSSGS |
| | F58-IgG- | AASGSSGGSSSGADIQMTQSPSSLSASVGDRVTIT |
| | Hole-Flag | CRASQDVSTAVAWYQQKPGKAPKLLIYSASFL |
| | | YSGVPSRFSGSGSGTDFTLTISSLQPEDFATYY |
| | | CQQSYTTPPTFGQGTKVEIKGGGGSGGGGSGG |
| | | GGSEVQLVESGGGLVQPGGSLRLSCAASGFNIS |
| | | YSYIHWVRQAPGKGLEWVASIYSSSGSTSYAD |
| | | SVKGRFTISADTSKNTAYLQMNSLRAEDTAVY |
| | | YCARGAIDYWGQGTLVTVSSASTKGPSVFPLAP |
| | | SSKSTSGGTAALGCLVKDYFPEPVTVSWNSGALT |
| | | SGVHTFPAVLQSSGLYSLSSVVTVPSSSLGTQTYI |
| | | CNVNHKPSNTKVDKKVEPKSCDKTHTCPPCPAP |
| | | EAAGGPSVFLFPPKPKDTLMISRTPEVTCVVVDV |
| | | SHEDPEVKFNWYVDGVEVHNAKTKPREEQYNS |
| | | TYRVVSVLTVLHQDWLNGKEYKCKVSNKALGA |
| | | PIEKTISKAKGQPREPQVYTLPPSREEMTKNQVSL |
| | | WCLVKGFYPSDIAVEWESNGQPENNYKTTPPVL |
| | | DSDGSFFLYSKLTVDKSRWQQGNFSCSVMHEA |
| | | [chemical structure] |
| | | [chemical structure] |
| | | [chemical structure] |
| | | [chemical structure] |
| | | [chemical structure] |
| | | >F58-IgG-Hole Flag HC SEQ ID NO: 203 |
| | | EVQLVESGGGLVQPGGSLRLSCAASGFNISYS |
| | | YIHWVRQAPGKGLEWVASIYSSSGSTSYADSV |
| | | KGRFTISADTSKNTAYLQMNSLRAEDTAVYYC |
| | | ARGAIDYWGAGTLVTVSSASTKGPSVFPLAPSS |
| | | KSTSGGTAALGCLVDKDYFPEVTVSWNSGALTS |
| | | GVHTFPAVLQSSGLYSLSSVVTVPSSSLGTQTYIC |
| | | NVNHKPSNTKVDKKVEPKSCDKTHTCPPCPAPE |
| | | AAGGSVFLFPPKPKDTLMISRTPEVTCVVVDVS |
| | | HEDPEVKFNWYVDGVEVHNAKTKPREEQYNST |
| | | YRVVSVLTVLHQDWLNGKEYKCKVSNKALGAP |
| | | IEKTISKAKGQPREPQVYTLPPSREEMTKNQVSLS |
| | | CAVKGFYPSDIAVEWESNGQPENNYKTTPPVLDS |
| | | DGSFFLVSKLTVDKSRWQQGNVFSCSVMHEALH |
| | | NHYTQKSLSLSPGKGSGSGDYKDDDDK |
| | | >F58 LC SEQ ID NO: 204 |
| | | DIQMTQSPSSLSASVGDRVTITCRASQSVSSAV |
| | | AWYQQKPGKAPKLLIYSASSLYSGVPSRFSGS |
| | | RSGTDFTLTISSLQPEDFATYYCQQWYSSGHV |
| | | LITFGQGTKVEIKRTVAAPSVFIFPPSDEQLKSGT |
| | | ASVVCLLNNFYPREAKVQWKVDNALQSQNSQE |
| | | SVTEQDSKDSTYSLSSTLTLSKADYEKHKVYACE |
| | | VTHQGLSSPVTKSFNRGEC |
| | L6-N-HC | L6-N-HC appended ScFv-F4-2-IgG-RSPO2RA-Knob- |
| | appended | His HC SEQ ID NO: 177 |
| | ScFv-F4-2- | EVQLVESGGGLVQPGGSLRLSCAASGFTFTSY |
| | IgG- | YISWVRQAPGKGLEWVAEISPYSGSTYYADSV |
| | RSPO2RA- | KGRFTISADTSKNTAYLQMNSLRAEDTAVYYC |
| | Knob-his + | ALRARPPIRLHPRGSVMDYWGQGTLVTVSSGS |
| | F4-2-IgG- | AASGSSGGSSSGADIQMTQSPSSLSASVGDRVTIT |
| | Hole-Flag | CRASQDVSTAVAWYQQKPGKAPKLLIYSASFL |
| | | YSTVPSRFSGSGSGTDFTLTISSLQPEDFATYY |
| | | CQQSYTTPPTFGQGTKVEIKGGGGSGGGGSGG |
| | | GGSEVQLVESGGGLVQPGGSLRLSCAASGFNIS |
| | | YYYIHWVRQAPGKGLEWVASIYPSSGYTYYA |
| | | DSVKGRFTISADTSKNTAYLQMNSLRAEDTAV |
| | | YYCARSSFYWAMDYWGQGTLVTVSSASTKGP |
| | | SVFPLAPSSKSTSGGTAALGCLVKDYFPEPVTVS |
| | | WNSGALTSGVHTFPAVLQSSGLYSLSSVVTVPSS |
| | | SLGTQTYICNVNHKPSNTKVDKKVEPKSCDKTH |
| | | TCPPCPAPEAAGGPSVFLFPPKPKDTLMISRTPEV |
| | | REEQYNSTYRVVSVLTVLHQDWLNGKEYKCKV |
| | | SNKALGAPIEKTIASKAKGQPREPQVYTLPPSREEM |
| | | TKNQVSLWCLVKGFYPSDIAVEWESNGQPENNY |
| | | KTTPPVLDSDGSFFLYSKLTVDKSRWQQGNVFSC |
| | | SVMHEALHNHYTQKSLSLSPGKGGGGSGGGGSG |
| | | [chemical structure] |
| | | [chemical structure] |
| | | [chemical structure] |
| | | [chemical structure] |
| | | >F4-IgG-Hole Flag HC SEQ ID NO: 178 |
| | | EVQLVESGGGLVQPGGSLRLSCAASGFNISYY |
| | | YIHWVRQAPGKGLEWVASIYPSSGYTYYADSV |
| | | KGRFTISADTSKNTAYLQMNSLRAEDTAVYYC |
| | | ARSSFYWAMDYWGQGTLVTVSSASTKGPSVFP |
| | | LAPSSKSTSGGTAALGCLVKDYFPEPVTVSWNSG |
| | | ALTSGVHTFPAVLQSSGLYSLSSVVTVPSSSLGTQ |
| | | TYICNVNHKPSNTKVDKKVEPKSCDKTHTCPPCP |
| | | APEAAGGPSVFLFPPKPKDTLMISRTPEVTCVVV |
| | | DVSHEDPEVKFNWYVDGVEVHNAKTKPREEQY |
| | | NSTYRVVSVLTVLHQDWLNGKEYKCKVSNKAL |
| | | GAPIEKTISKAKGQPREPQVYTLPPSREEMTKNQ |
| | | VSLSCAVKGFYPSDIAVEWESNGQPENNYKTTPP |
| | | VLDSDGSFFLVSKLTVDKSRWQQGNVFSCSVMH |
| | | EALHNHYTQKSLSLSPGKGSGSGDYKDDDDK |
| | | >F4-2 LC SEQ ID NO: 179 |
| | | DIQMTQSPSSLSASVGDRVTITCRASQSVSSAV |
| | | AWYQQKPGKAPKLLIYSASSLYSGVPSRFSGS |
| | | RSGTDFTLTISSLQPEDFATYYCQQSYAAYLFT |
| | | FGQGTKVEIKRTVAAPSVFIFPPSDEQLKSGTAS |
| | | VVCLLNNFYPREAKVQWKVDNALQSGNSQESV |
| | | TEQDSKDSTYSLSSTLTLSKADYEKHKVYACEVT |
| | | HQGLSSPVTKSFNRGEC |
| | L6-N-HC | L6-N-HC appended ScFv-F4-IgG-RSPO2RA-Knob- |
| | appended | His HC SEQ ID NO: 180 |
| | ScFv-F4- | EVQLVESGGGLVQPGGSLRLSCAASGFTFTSY |
| | IgG- | YISWVRQAPGKGLEWVAEISPYSGSTYYADSV |
| | RSPO2RA- | KGRFTISADTSKNTAYLQMNSLRAEDTAVYYC |
| | Knob-his + | ALRARPPIRLHPRGSVMDYWGQGTLVTVSSGS |
| | F4-IgG- | AASGSSGGSSSGADIQMTQSPSSLSASVGDRVTIT |
| | Hole-Flag | CRASQDVSTAVAWYQQKPGKAPKLLIYSASFL |
| | | YSGVPSRFSGSGSGTDFTLTISSLQPEDFATYY |
| | | CQQSYTTPPTFGQGTKVEIKGGGGSGGGGSGG |
| | | GGSEVQLVESGGGLVQPGGSLRLSCAASGFNL |
| | | SSYSMHWVRQAPGKGLEWVAYISSYYGYTYY |
| | | ADSVKGRFTISADTSKNTAYLQMNSLRAEDTA |
| | | VYYCARPAPGHWGFDYWGQGTLVTVSSASTK |
| | | GPSVFPLAPSSKSTSGGTAALGCLVKDYFPEPVT |
| | | VSWNSGALTSGVHTFPAVLQSSGLYSLSSVVTVP |
| | | SSSLGTQTYICNVNHKPSNTKVDKKVEPKSCDKT |
| | | HTCPPCPAPEAAGGPSVFLFPPKPKDTLMISRTPE |
| | | VTCVVVDVSHEDPEVKFNWYVDGVEVHNAKTK |
| | | PREEQYNSTYRVVSVLTVLHQDWLNGKEYKCK |
| | | VSNKALGAPIEKTISKAKGQPREPQVYTLPPSREE |
| | | MTKNQVSLWCLVKGFYPSDIAVEWESNGQPENN |
| | | YKTTPPVLDSDGSFFLYSKLTVDKSRWQQGNVF |
| | | SCSVMHEALHNHYTQKSLSLSPGKGGGGSGGGG |
| | | [chemical structure] |
| | | [chemical structure] |
| | | [chemical structure] |
| | | [chemical structure] |
| | | >F4-IgG-Hole Flag HC SEQ ID NO: 181 |
| | | EVQLVESGGGLVQPGGSLRLSCAASGFNLSSY |
| | | SMHWVRQAPGKGLEWVAYISSYYGYTYYADS |
| | | VKGRFTISADTSKNTAYLQMNSLRAEDTAVYY |
| | | CARPAPGHWGFDYWGQGTLVTVSSASTKGPS |
| | | VFPLAPSSKSTSGGTAALGCLVKDYFPEPVTVSW |
| | | NSGALTSGVHTFPAVLQSSGLYSLSSVVTVPSSSL |
| | | GTQTYICNVNHKPSNTKVDKKVEPKSCDKTHTC |
| | | PPCPAPEAAGGPSVFLFPPKPKDTLMISRTPEVTC |
| | | VVVDVSHEDPEVKFNWYVDGVEVHNAKTKPRE |
| | | EQYNSTYRVVSVLTVLHQDWLNGKEYKCKVSN |
| | | KALGAPIEKTISKAKGQPREPQVYTLPPSREEMT |
| | | KNQVSLSCAVKGFYPSDIAVEWESNGQPENNYK |
| | | TTPPVLDSDGSFFLVSKLTVDKSRWQQGNVFSCS |
| | | VMHEALHNHYTQKSLSLSPGKGSGSGDYKDDDD |
| | | K |
| | | >F4 LC SEQ ID NO: 182 |
| | | DIQMTQSPSSLSASVGDRVTITCRASQSVSSAV |
| | | AWYQQKPGKAPKLLIYSASSLYSGVPSRFSGS |
| | | RSGTDFTLTISSLQPEDFATYYCQQWYYAPITF |
| | | GQGTKVEIKRTVAAPSVFIFPPSDEQLKSGTASV |
| | | VDLLNNFYPREAKVQWKVDNALQSGNSQESVTE |
| | | QDSKDSTYSLSSTLTLSKADYEKHKVYACEVTH |
| | | QGLSSPVTKSFNRGEC |
| | L6-N-HC | L6-N-HC appended ScFv-F49-IgG-RSPO2RA-Knob- |
| | appended | His HC SEQ ID NO: 183 |
| | ScFv-F49- | EQVLVESGGGLVQPGGSLRLSCAASGFTFTSY |
| | IgG- | YISWVRQAPGKGLEWVAEISPYSGSTYYADSV |
| | RSPO2RA- | KGRFTISADTSKNTAYLQMNSLRAEDTAVYYC |
| | Knob-his + | ALRARPPIRLHPRGSVMDYWGQGTLVTVSSGS |
| | F49-IgG- | AASGSSGGSSSGADIQMTQSPSSLSASVGDRVTIT |
| | Hole-Flag | CRASQDVSTAVAWYQQKPGKAPKLLIYSASFL |
| | | YSGVPSRFSGSGSGTDFTLTISSLQPEDFATYY |
| | | CQQSYTTPPTFGQGTKVEIKGGGGSGGGGSGG |
| | | GGSQVQLVQSGAEVKKPGASVKVSCKASGGT |
| | | FSSYAISWVRQAPGQGLEWMGWINAGNGNTT |
| | | YAQKFQGRVTMTRDTSTSTVYMELSSLRSEDT |
| | | AVYYCARHYYGSGSYPKDWGQGTLVTVSSAST |
| | | KGPSVFPLAPSSKSTSGGTAALGCLVKDYFPEPV |
| | | TVSWNSGALTSGVHTFPAVLQSSGLYSLSSVVTV |
| | | PSSSLGTQTYICNVNHKPSNTKVDKKVEPKSCDK |
| | | THTCPPCPAPEAAGGPSVFLFPPKPKDTLMISRTP |
| | | EVTCVVVDVSHEDPEVKFNWYVDGVEVHNAKT |
| | | KPREEQYNSTYRVVSVLTVLHQDWLNGKEYKC |
| | | KVSNKALGAPIEKTISKAKGQPREPQVYTLPPSRE |
| | | EMTKNQVSLWCLVKGFYPSIAVEWESNGQPEN |
| | | NYKTTPPVLDSDGSFFLYSKLTVDKSRWQQGNV |
| | | FSCSVMHEALHNHYTQKSLSLSPGKGGGGSGGG |
| | | [chemical structure] |
| | | [chemical structure] |
| | | [chemical structure] |
| | | [chemical structure] |
| | | >F49-IgG-Hole Flag HC SEQ ID NO: 184 |
| | | QVQLVQSGAEVKKPGASVKVSCKASGGTFSSY |
| | | AISWVRQAPGQGLEWMGWINAGNGNTTYAQ |
| | | KFQGRVTMTRDTSTSTVYMELSSLRSEDTAVY |
| | | YCARHYYGSGSYPDWGQGTLVTVSSASTKGPS |
| | | VFPLAPSSKSTSGGTAALGCLVKDYFPEPVTVSW |
| | | NSGALTSGVHTFPAVLQSSGLYSLSSVVTVPSSSL |
| | | GTQTYICNVNHKPSNTKVDKKVEPKSCDKTHTC |
| | | PPCPAPEAAGGPSVFLFPPKPKDTLMISRTPEVTC |
| | | VVVDVSHEDPEVKFNWYVDGVEVHNAKTKPRE |
| | | EQYNSTYRVVSVLTVLHQDWLNGKEYKCKVSN |
| | | KALGAPIEKTISKAKGQPREPQVYTLPPSREEMT |
| | | KNQVSLSCAVKGFYPSDIAVEWESNGQPENNYK |
| | | TTPPVLDSDGSFFLVSKLTVDKSRWQQGNVFSCS |
| | | VMHEALHNHYTQKSLSLSPGKGSGSGDYKDDDD |
| | | K |
| | | >F49 LC SEQ ID NO: 185 |
| | | DIQMTQSPSSPSASVGDRVTITCRASQSISSYLN |
| | | WYQQKPGKAPKLLIYAASSLQSGVPSRFSGSG |
| | | SGTDFTLTISSLQPEDFATYYCQQSYSTPLTFG |
| | | GGTKVEIKRTVAAPSVFIFPPSDEQLKSGTASVV |
| | | CLLNNFYPREAKVQWKVDNALQSGNSQESVTEQ |
| | | DSKDSTYSLSSTLTLSKADYEKHKVYACEVTHQ |
| | | GLSSPVTKSFNRGEC |
| | L6-N-HC | >L6-N-HC appended ScFv-F10-IgG-RSPO2RA- |
| | appended | Knob-His HC SEQ ID NO: 186 |
| | ScFv-F10- | EVQLVESGGGLVQPGGSLRLSCAASGFTFTSY |
| | IgG- | YISWVRQAPGKGLEWVAEISPYSGSTYYADSV |
| | RSPO2RA- | KGRFTISADTSKNTAYLQMNSLRAEDTAVYYC |
| | Knob-his + | ALRARPPIRLHPRGSVMDYWGQGTLVTVSSGS |
| | F10-IgG- | AASGSSGGSSSGADIQMTQSPSSLSASVGDRVTIT |
| | Hole-Flag | CRASQDVSTAVAWYQQKPGKAPKLLIYSASFL |
| | | YSGVPSRFSGSGSGTDFTLTISSLQPEDFATYY |
| | | CQQSYTTPPTFGQGTKVEIKGGGGSGGGGSGG |
| | | GGSEVQLVESGGGLVQPGGSLRLSCAASGFTF |
| | | SSFNMFWVRQAPGKGLEWVAGIDDDGSYPNY |
| | | GSAVKGRATISRDNSKNTLYLQMNSLRAEDTA |
| | | VYYCAKSGYGGSWGGYIADDIDAWGQGTLVT |
| | | VSSASTKGPSVFPLAPSSKSTSGGTAALGSCLVKD |
| | | YFPEPVTVSWNSGALTSGVHTFPAVLQSSGLYSL |
| | | SSVVTVPSSSLGTQTYICNVNHKPSNTKVDKKVE |
| | | PKSCDKTHTCPPCPAPEAAGGPSVFLFPPKPKDTL |
| | | MISRTPEVTCVVVDVSHEDPEVKFNWYVDGVEV |
| | | HNAKTKPREEQYNSTYRVVSVLTVLHQDWLNG |
| | | KEYKCKVSNKALGAPIEKTISKAKGQPREPQVYT |
| | | LPPSREEMTKNQVSLWCLVKGFYPSDIAVEWES |
| | | NGQPENNYKTTPPVLDSDGSFFLYSKLTVDKSR |
| | | WQQGNFSCSVMHEALHNHYTQKSLSLSPGKG |
| | | [chemical structure] |
| | | [chemical structure] |
| | | [chemical structure] |
| | | [chemical structure] |
| | | >F10-IgG-Hole Flag HC SEQ ID NO: 187 |
| | | EVQLVESGGGLVQPGGSLRLSCAASGFTFSSF |
| | | NMFWVRQAPGKGLEWVAGIDDDGSYPNYGS |
| | | AVKGRATISRDKNSKNTLYLQMNSLRAEDTAVY |
| | | YCAKSGYGGSWGGYIADDIDAWGQGTLVTVS |
| | | SASTKGPSVFPLAPSSKSTSGGTAALGCLVKDYF |
| | | PEPVTVSWNSGALTSGVHTFPAVLQSSGLYSLSS |
| | | VVTVPSSSLGTQTYICNVNHKPSNTKVDKKVEPK |
| | | SCDKTHTCPPCPAPEAAGGPSVFLFPPKPKDTLMI |
| | | SRTPEVTCVVVDVSHEDPEVKFNWYVDGVEVH |
| | | NAKTKPREEQYNSTYRVVSVLTVLHQDWLNGK |
| | | EYKCKVSNKALGAPIEKTISKAKGQPREPQVYTL |
| | | PPSREEMTKNQVSLSCAVKGFYPSDIAVEWESNG |
| | | QPENNYKTTPPVLDSDGSFFLVSKLTVDKSRWQ |
| | | QGNVFSCSVMHEALHNHYTQKSLSLSPGKGSGS |
| | | GDYKDDDDK |
| | | >F10 LC SEQ ID NO: 188 |
| | | ELTQPPSVSVSPGQTARITCSGDGSYAGSYYYG |
| | | WYQQKPGQAPVITLIYYNNKRPSGIPERGSGSL |
| | | SGSTNTLTISGVQAEDEADYYCGSADNSGAAF |
| | | GGGTKLTVLRTVAAPSVFIFPPSDEQLKSGTASV |
| | | VCLLNNFYPREAKVQWKVDNALQSGNSQESVTE |
| | | QDSKDSTYSLSSTLTLSKADYEKHKVYACEVTH |
| | | QGLSSPVTKSFNRGEC |
| | L6-N-HC | L6-N-HC appended ScFv-F7B-IgG-RSPO2RA HC |
| | appended | SEQ ID NO: 205 |
| | ScFv-F7B- | EVQLVESGGGLVQPGGSLRLSCAASGFTFTSY |
| | IgG- | YISWVRQAPGKGLEWVAEISPYSGSTYYADSV |
| | RSPO2RA | KGRFTISADTSKNTAYLQMNSLRAEDTAVYYC |
| | | ALRARPPIRLHPRGSVMDYWGQGTLTVTVSSGS |
| | | AASGSSGGSSSGADIQMTQSPSSLSASVGDRVTIT |
| | | CRASQDVSTAVAWYQQKPGKAPKLLIYSASFL |
| | | YSGVPSRFSGSGSGTDFTLTISSLQPEDFATYY |
| | | CQQSYTTPPTFGQGTKVEIKGGGGSGGGGSGG |
| | | GGASTKGPSVFPLAPSSKSTSGGTAALGCLVKDY |
| | | FPEPVTVSWNSGALTSGVHTFPAVLQSSGLYSLS |
| | | SVVTVPSSSLGTQTYICNVNHKPSNTKVDKKVEP |
| | | KSCDKTHTCPPCPAPEAAGGPSVFLFPPKPKDTL |
| | | MISRTPEVTCVVVDVSHEDPEVKFNWYVDGVEV |
| | | HNAKTKPREEQYNSTYRVVSVLTVLHQDWLNG |
| | | KEYKCKVSNKALGAPIEKTISDKAKGQPREPQVYT |
| | | LPPSREEMTKNQVSLTCLVKGFYPSDIAVEWESN |
| | | GQPENNYKTTPPVLDSDGSFFLYSKLTVDKSRW |
| | | QQGNVFSCSVMHEALHNHYTQKSLSLSPGKGGG |
| | | [chemical structure] |
| | | [chemical structure] |
| | | [chemical structure] |
| | | [chemical structure] |
| | | F7B LC SEQ ID NO: 206 |
| | | DIQMTQSPSSLSASVGDRVTITCRASQSVSSAV |
| | | AWYQQKPGKAPKLLIYSASSLYSGVPSRFSGS |
| | | RSGTDTLTISSLQPEDFATYYCQQYYSLFTFG |
| | | QGTKVEIKRTVAAPSVFIFPPSDEQLKSGTASVV |
| | | CLLNNFYPREAKVQWKVDNALQSGNSQESVTEQ |
| | | DSKDSTYSLSSTLTLSKADYEKHKVYACEVTHQ |
| | | GLSSPVTKSFNRGEC |
| | L6-N-HC | >L6-N-HC appended ScFv-F21-IgG-RSPO2RA HC |
| | appended | SEQ ID NO: 207 |
| | ScFv-F2I- | EVQLVESGGGLVQPGGSLRLSCAASGFTFTSY |
| | IgG- | YISWVRQAPGKGLEWVAEISPYSGSTYYADSV |
| | RSPO2RA | KGRFTISADTSKNTAYLQMNSLRAEDTAVYYC |
| | | ALRARPPIRLHPRGSVMDYWGQGTLVTVSSGS |
| | | AASGSSGGSSSGADIQMTQSPSSLSASVGDRVTIT |
| | | CRASQDVSTAVAWYQQKPGKAPKLLIYSASFL |
| | | YSGVPSRFSGSGSGTDFTLTISSLQPEDFATYY |
| | | CQQSYTTPPTFGQGTKVEIKGGGGSGGGGSGG |
| | | GGSEVQLVESGGGLVQPGGSLRLSCAASGFNI |
| | | HSSSIHWVRQAPGKGLEWVAATYSSFGSITYA |
| | | DSVKGRFTISADTSKNTAYLQMNSLRAEDTAV |
| | | YYCARYHHPFGYALDYWGQGTLVTVSSASTK |
| | | GPSVFPLAPSSKSTSGGTAALGCLVKDYFPEPVT |
| | | VSWNSGALTSGVHTFPAVLQSSGLYSLSSVVTVP |
| | | SSSLGTQTYICNVNHKPSNTKVDKKVEPKSCDKT |
| | | HTCPPCPAPEAAGGPSVFLFPPKPKDTLMISRTPE |
| | | VTCVVVDVSHEDPEVKFNWYVDGVEVHNAKTK |
| | | PREEQYNSTYRVVSVLTVLHQDWLNGKEYKCK |
| | | VSNKALGAPIEKTISKAKGQPREPQVYTLPPSREE |
| | | MTKNQVSLTCLVKGFYPSDIAVEWESNGQPENN |
| | | YKTTPPVLDSDGSFFLYSKLTVDKSRWQQGNVF |
| | | SCSVMHEALHNHYTQKSLSLSPGKGGGGSGG |
| | | [chemical structure] |
| | | [chemical structure] |
| | | [chemical structure] |
| | | [chemical structure] |
| | | >F21 LC SEQ ID NO: 208 |
| | | DIQMTQSPSSLSASVGDRVTITCRASQSVSSAV |
| | | AWYQQKPGKAPKLLIYSASSLYSGVPSRFSGS |
| | | RSGTDFTLTISSLQPEDFATYYCQQGVYLFTFG |
| | | QGTKVEIKRTVAAPSVFIFPPSDEQLKSGTASVV |
| | | CLLNNFYPREAKVQWKVDNALQSGNSQESVTEQ |
| | | DSKDSTYSLSSTLTLSKADYEKHKVYACEVTHQ |
| | | GLSSPVTKSFNRGEC |
| | L6-N-HC | >L6-N-HC appended ScFv-F7B-IgG-RSPO2RA- |
| | appended | Knob-His HC SEQ ID NO: 209 |
| | ScFv-F7B- | EVQLVESGGGLVQPGGSLRLSCAASGFTFTSY |
| | IgG- | YISWVRQAPGKGLEWVAEISPYSGSTYYADSV |
| | RSPO2RA- | KGRFTISADTSKNTAYLQMNSLRAEDTAVYYC |
| | Knob-his + | ALRARPPIRLHPRGSVMDYWGQGTLVTVSSGS |
| | F7B-IgG- | AASGSSGGSSGADIQMTQSPSSLSASVGDRVTIT |
| | RSPO2RA | CRASQDVSTAVAWYQQKPGKAPKLLIYSASFL |
| | Hole-Flag | YSGVPSRFSGSGSGTDFTLTISSLQPEDFATYY |
| | | CQQSYTTPPTFGQGTKVEIKGGGGSGGGGSGG |
| | | GGSEVQLVESGGGLVQPGGSLRLSCAASGFNF |
| | | SSSSIHWVRQAPGKGLEWVAYIYPSYDYTYYA |
| | | DSVKGRFTISADTSKNTAYLQMNSLRAEDTAV |
| | | YYCARGYFYTWGGMDYWGQGTLVTVSSAST |
| | | KGPSVFPLAPSSKSTSGGTAALGCLVKDYFPEPV |
| | | TVSWNSGALTSGVHTFPAVLQSSGLYSLSSVVTV |
| | | PSSSLGTQTYICNVNHKPSNTKVDKKVEPKSCDK |
| | | THTCPPCPAPEAAGGPSVFLFPPKPKDTLMISRTP |
| | | EVTCVVVDVSHEDPEVKFNWYVDGVEVHNAKT |
| | | KPREEQYNSTYRVVSVLTVLHQDWLNGKEYKC |
| | | KVSNKALGAPIEKTISKAKGQPREPQVYTLPPSRE |
| | | EMTKNQVSLWCLVKGFYPSDIAVEWESNGQPEN |
| | | NYKTTPPVLDSDGSFFLYSKLTVDKSRWQQGNV |
| | | FSCSVMHEALHNHYTQKSLSLSPGKGGGGSGGG |
| | | [chemical structure] |
| | | [chemical structure] |
| | | [chemical structure] |
| | | [chemical structure] |
| | | >F7B-IgG-RSPO2RA-Hole Flag HC SEQ ID NO: 210 |
| | | EVQLVESGGGLVQPGGSLRLSCAASGFNFSSSS |
| | | IHWVRQAPGKGLEWVAYIYPSYDYTYYADSV |
| | | KGRFTISADTSKNTAYLQMNSLRAEDTAVYYC |
| | | ARGYFYTWGGMDYWGQGTLVTVSSASTKGPS |
| | | VFPLAPSSKSTSGGTAALGCLVKDYFPEPVTVSW |
| | | NSGALTSGVHTFPAVLQSSGLYSLSSVVTVPSSSL |
| | | GTQTYICNVNHKPSNTKVDKKVEPKSCDKTHTC |
| | | PPCPAPEAAGGPSVFLFPKKPKDTLMISRTPEVTC |
| | | VVVDVSHEDPEVKFNWYVDGVEVHNAKTKPRE |
| | | EQYNSTYRVVSVLTVLHQDWWLNGKEYKCKVSN |
| | | KALGAPIEKTISKAKGQPREPQVYTLPPSREEMT |
| | | KNWVSLSCAVKGFYPSDIAVEWESNGQPENNYK |
| | | TTPPVLDSDGSFFLVSKLTVDKSRWQQGNVFSCS |
| | | VMHEALHNHYTQKSLSLSPGKGGGGSGGGGSGG |
| | | [chemical structure] |
| | | [chemical structure] |
| | | [chemical structure] |
| | | [chemical structure] |
| | | >F7B LC SEQ ID NO: 211 |
| | | DIQMTQSPSSLSASVGDRVTITCRASQSVSSAV |
| | | AWYQQKPGKAPKLLIYSASSLYSGVPSRFSGS |
| | | RSGTDFTLTISSLQPEDFATYYCQQYYSLFTFG |
| | | QGTKVEIKRTVAAPSVFIFPPSDEQLKSGTASVV |
| | | CLLNNFYPREAKVQWKVDNALQSGNSQESVTEQ |
| | | DSKDSTYSLSSTLTLSKADYEKHKVYCEVTHQ |
| | | GLSSPVTKSFNRGEC |
| | L6-N-HC | >L6-N-HC appended ScFv-F21-IgG-RSPO2RA-Knob- |
| | appended | His HC SEQ ID NO: 212 |
| | ScFv-F2I- | EVQLVESGGGLVQPGGGSLRLSCAASGFTFTSY |
| | IgG- | YIDWVRQAPGKGLEWVAEISPYSGSTYYADSV |
| | RSPO2RA- | KGRFTISADTSKNTAYLQMNSLRAEDTAVYYC |
| | Knob-his + | ALRARPPIRLHPRGSVMDYWGQGTLVTVSSGS |
| | F21-IgG- | AASGSSGGSSSGADIQMTQSPSSLSASVGDRVTIT |
| | RSPO2RA | CRASQDVSTAVAWYQQKPGKAPKLLIYSASFL |
| | Hole-Flag | YSGVPSRFSGSGSGTDFTLTISSLQPEDFATYY |
| | | CQQSYTTPPTFGQGTKVEIKGGGGSGGGGSGG |
| | | GGSEVQLVESGGGLVQPGGSLRLSCAASGFNI |
| | | HSSSIHWVRQAPGKGLEWVAATYSSFGSITYA |
| | | DSVKGRFTISADTSKNTAYLQMNSLRAEDTAV |
| | | YYCARYHHPFGYALDYWGQGTLVTVSSASTK |
| | | GPSVFPLAPSSKSTSGGTAALGCLVDYFPEPVT |
| | | VSWNSGALTSGVHTFPAVLQSSGLYSLSSVVTVP |
| | | SSSLGTQTYICNVNHKPSNTKVDKKVEPKSCDKT |
| | | HTCPPCPAPEAAGGPSVFLFPPKPKDTLMISRTPE |
| | | VTCVVVDVSHEDPEVKFNWYVDGVEVHNAKTK |
| | | PREEQYNSTYRVVSVLTVLHQDWLNGKEYKCK |
| | | VSNKALGAPIEKTISKAKGQPREPQVYTLPPSREE |
| | | MTKNQVSLWCLVKGFYPSDIAVEWESNGQPENN |
| | | YKTTPPVLDSDGSFFLYSKLTVDKSRWQQGNVF |
| | | SCSVMHEALHNHYTQKSLSLSPGKGGGGSGGGG |
| | | [chemical structure] |
| | | [chemical structure] |
| | | [chemical structure] |
| | | [chemical structure] |
| | | >F2I-IgG-RSPO2RA-Hole Flag HC SEQ ID NO: 213 |
| | | EVQLVESGGGLVQPGGSLRLSCAASGFNIHSSS |
| | | IHWVRQAPGKGLEWVAATYSSFGSITYADSVK |
| | | GRFTISADTSKNTAYLQMNSLRAEDTAVYYCA |
| | | RYHHPFGYALDYWGQGTLVTVSSASTKGPSVF |
| | | PLAPSSKSTSGGTAALGCLVKDYFPEVTVSWNS |
| | | GALTSGVHTFPAVLQSSGLYSLSSVVTVPSSSLGT |
| | | QTYICNVNHKPSNTKVDKKVEPKSCDKTHTCPP |
| | | CPAPEAAGGPSVFLFPPKPKDTLMISRTPEVTCVV |
| | | VDVSHEDPEVKFNWYVDGVEVHNAKTKPREEQ |
| | | YNSTYRVVSVLTVLHQDWLNGKEYKCKVSNKA |
| | | LGAPIEKTISDKAKGQPREPQVYTLPPSREEMTKN |
| | | QVSLSCAVKGFYPSDIAVEWESNGQPENNYKTTP |
| | | PVLDSDGSFFLVSKLTVDKSRWQQGNFSCSVM |
| | | HEALHNHYTQKSLSLSPGKGGGGSGGGGSGGGG |
| | | [chemical structure] |
| | | [chemical structure] |
| | | [chemical structure] |
| | | [chemical structure] |
| | | >FI LC SEQ ID NO: 214 |
| | | DIQMTQSPSSLSASVGDRVTITCRASQSVSSAV |
| | | AWYQQKPGKAPKLLIYSASSLYSGVPSRFSGS |
| | | RSGTDFTLTISSLQPEDFATYYCQQGVYLFTFG |
| | | QGTKVEIKRTVAAPSVFIFPPSDEQLKSGTASVV |
| | | CLLNNFYPREAKVQWKVDNALQSGNSQESVTEQ |
| | | DSKDSTYSLSSTLTLSKADYEKHKVYACEVTHQ |
| | | GLSSPVTKSFNRGEC |
| | L6-N-HC | >L6-N-HC appended ScFv-F7B-IgG-RSPO2RA- |
| | appended | Knob-His HC SEQ ID NO: 215 |
| | ScFv-F7B- | EVQLVESGGGLVQPGGSLRLSCAASGFTFTSY |
| | IgG- | YISWRQAPGKGLEWVAEISPYSGSTYYADSV |
| | RSPO2RA- | KGRFTISADTSKNTAYLQMNSLRAEDTAVYYC |
| | Knob-his + | ALRARPPIRLHPRGSVMDYWGQGTLVTVSSGS |
| | L6-N-HC | AASGSSGGSSSGADIQMTQSPSSLSASVGDRVTIT |
| | appended | CRASQDVSTAVAWYQQKPGKAPKLLIYSASFL |
| | ScFv-F7B- | YSGVPSRFSGSGSGTDFTLTISSLQPEDFATYY |
| | IgG-Hole- | CQQSYTTPPTFGQGTKVEIKGGGGSGGGGSGG |
| | Flag | GGSEVQLVESGGGLVQPGGSLRLSCAASGFNF |
| | | SSSSIHWVRQAPGKGLEWVAYIYPSYDYTYYA |
| | | DSVKGRFTISADTSKNTAYLQMNSLRAEDTAV |
| | | YYCARGYFYTWGGMDYWGQGTLVTVSSAST |
| | | KGPSVFPLAPSSKSTSGGTAALGCLVKDYFPEPV |
| | | TVSWNSGALTSGVHTFPAVLQSSGLYSLSSVVTV |
| | | PSSSLGTQTYICNVNHKPSNTKVDKKVEPKSCDK |
| | | THTCPPCPAPEAAGGPSVFLFPPKPKDTLMISRTP |
| | | EVTCVVVDVSHEDPEVKFNWYVDGVEVHNAKT |
| | | KPREEQYNSTYRVVSVLTVLHQDWLNGKEYKC |
| | | KVSNKALGAPIEKTISKAKGQPREPQVYTLPPSRE |
| | | EMTKNQVSLWCLVKGFYPSDIAVEWESNGQPEN |
| | | NYKTTPPVLDSDGSFFLYSKLTVDKSRWQQGNV |
| | | FSCSVMHEALHNHYTQKSLSLSPGKGGGGSGGG |
| | | [chemical structure] |
| | | [chemical structure] |
| | | [chemical structure] |
| | | [chemical structure] |
| | | >L6-N-HC appended ScFv-F7B-IgG-Hole Flag HC |
| | | SEQ ID NO: 216 |
| | | EVQLVESGGGLVQPGGSLRLSCAASGFTFTSY |
| | | YISWVRQAPGKGLEWVAEISPYSGSTYYADSV |
| | | KGRFTISADTSKNTAYLQMNSLRAEDTAVYYC |
| | | ALRARPPIRLHPRGSVMDYWGQGTLVTVSSGS |
| | | AASGSSGGSSSGADIQMTQSPSSLSASVGDRVTIT |
| | | CRASQDVSTAVAWYQQKPGKAPKLLIYSASFL |
| | | YSGVPSRFSGSGSGTDFTLTISSLQPEDFATYY |
| | | CQQSYTTPPTFGQGKVEIKGGGGSGGGGSGG |
| | | GGSEVQLVESGGGLVQPGGSLRLSCAASGFNF |
| | | SSSSIHWVRQAPGKGLEWVAYIYPSYDYTYYA |
| | | DSVKGRFTISADTSKNTAYLQMNSLRAEDTAV |
| | | YYCARGYFYTWGGMDYWGQGTLVTVSSAST |
| | | KGPSVFPLAPSSKSTSGGTAALGCLVKDYFPEPV |
| | | TVSWNSGALTSGVHTFPAVLQSSGLYSLSSVVTV |
| | | PSSSLGTQTYICNVNHKPSNTKVDKKVEPKSCDK |
| | | THTCPPCPAPEAAGGPSVFLFPPKPKDTLMISRTP |
| | | EVTCVVVDVSHEDPEVKFNWYVDGVEVHNAKT |
| | | KPREEQYNSTYRVVSVLTVLHQDWLNGKEYKC |
| | | KVSNKALGAPIEKTISKAKGQPREPQVYTLPPSRE |
| | | EMTKNQVSLSCAVKGFYPSDIAVEWESNGQPEN |
| | | NYKPPTTVLDSDGSFFLVSKLTVDKSRWQQGNV |
| | | FSCSVMHEALHNHYTQKSLSLSPGKGSGSGDYK |
| | | DDDDK |
| | | >F7B LC SEQ ID NO: 217 |
| | | DIQMTQSPSSLSASVGDRVTITCRASQSVSSAV |
| | | AWYQQKPGKAPKLLIYSASSLYSGVPSRFSGS |
| | | RSGTDFTLTISSLQPEDFATYYCQQYYSLFTFG |
| | | QGTKVEIKRTVAAPSVFIFPPSDEQLKSGTASVV |
| | | CLLNNFYPREAKVQWKVDNALQSGNSQESVTEQ |
| | | DSKDSTYSLSSTLTLSKADYEKHKVYACEVTHQ |
| | | GLSSPVTKSFNRGEC |
| | L6-N-HC | >L6-N-HC appended ScFv-F2I-IgG-RSPO2RA-Knob- |
| | appended | HIS HC SEQ ID NO: 218 |
| | ScFv-F2I- | EVQLVESGGGLVQPGGSLRLSCAASGFTFTSY |
| | IgG- | YISWVRQAPGKGLEWVAEISPYSGSTYYADSV |
| | RSPO2RA- | KGRFTISADTSKNTAYLQMNSLRAEDTAVYYC |
| | Knob-hi + | ALRARPPIRLHPRGSVMDYWGQGTLVTVSSGS |
| | L6-N-HC | AASGSSGGSSSGADIQMTQSPSSLSASVGDRVTIT |
| | appended | CRASQDVSTAVAWYQQKPGKAPKLLIYSASFL |
| | ScFv-F2I- | YSGVPSRFSGSGSGTDFTLTISSLQPEDFATYY |
| | IgG-Hole- | CQQSYTTPPTFGQGTKVEIKGGGGSGGGGSGG |
| | Flag | GGSEVQLVESGGGLVQPGGSLRLSCAASHGNI |
| | | HSSSIHWVRQAPGKGLEWVAATYSSFGSITYA |
| | | DSVKGRFTISADTSKNTAYLQMNSLRAEDTAV |
| | | YYCARYHHPFGYALDYWGQGTLVTVSSASTK |
| | | GPSVFPLAPSSKSTSGGTAALGCLVKDYFPEPVT |
| | | VSWNSGALTSGVHTFPAVLQSSGLYSLSSVVTVP |
| | | SSSLGTQTYICNVNHKPSNTKVDKKVEPKSCDKT |
| | | HTCPPCPAPEAAGGPSVFLFPPKPKDTLMISRTPE |
| | | VTCVVVDVSHEDPEVKFNWYVDGVEVHNAKTK |
| | | PREEQYNSTYRVVSVLTVLHQDWLNGKEYKCK |
| | | VSNKALGAPIEKTISKAKGQPREPQVYTLPPSREE |
| | | MTKNQVSLWCLVKGFYPSIAVEWESNGQPENN |
| | | YKTTPPVLDSDGSFFLYSKLTVDKSRWQQGNVF |
| | | SCVMHEALHNHYTQKSLSLSPGKGGGGSGGGG |
| | | [chemical structure] |
| | | [chemical structure] |
| | | [chemical structure] |
| | | [chemical structure] |
| | | >L6-N-HC appended ScFv-F2I-IgG-Hole Flag HC |
| | | SEQ ID NO: 219 |
| | | EVQLVESGGGLVQPGGSLRLSCAASGFTFTSY |
| | | YISWVRQAPGKGLEWVAEISPYSGSTYYADSV |
| | | KGRFTISADTSKNTAYLQMNSLRAEDTAVYYC |
| | | ALRARPPIRLHPRGSVMDYWGQGTLVTVSSGS |
| | | AASGSSGGSSSGADIQMTQSPSSLSASVGDRVTIT |
| | | CRASQDVSTAVAWYQQKPGKAPKLLIYSASFL |
| | | YSGVPSRFSGSGSGTDFTLTISSLQPEDFATYY |
| | | CQQSYTTPPTFGQGTKVEIKGGGGSGGGGSGG |
| | | GGSEVQLVESGGGLVQPGGSLRLSCAASGFNI |
| | | HSSSIHWVRQAPGKGLEWVAATYSSFGSITYA |
| | | DSVKGRFTISADTSKNTAYLQMNSLRAEDTAV |
| | | YYCARYHHPFGYALDYWGQGTLVTVSSASTK |
| | | GPSVFPLAPSSKSTSGGTAALGCLVKDYFPEPVT |
| | | VSWNSGALTSGVHTFPAVLQSSGLYSLSSVVTVP |
| | | SSSLGTQTYICNVHKPSNTKVDKKVEPKSCDKT |
| | | HTCPPCPAPEAAGGPSVFLFPPKPKDTLMISRTPE |
| | | VTCVVVDVSHEDPEVKFNWYVDGVEVHNAKTK |
| | | PREEQYNSTYRVVSVLTVLHQDWLNGKEYKCK |
| | | VSNKALGAPIEKTISKAKGQPREPQVYTLPPSREE |
| | | MTKNQVSLSCAVKGFYPSDIAVEWESNGQPENN |
| | | YKTTPPVLDSDGSFFLVSKLTVDKSRWQQGNVF |
| | | SCSVMHEALHNHYTQKSLSLSPGKGSGSGDYKD |
| | | DDDK |
| | | >F2I LC SEQ ID NO: 220 |
| | | DIQMTQSPSSLSASVGDRVTITCRASQSVSSAV |
| | | AWYQQKPGKAPKLLIYSASSLYSGVPSRFSGS |
| | | RSGTDFTLTISSLQPEDFATYYCQQGVVLFTFG |
| | | QGTKVEIKRTVAAPSVFIFPPSDEQLKSGTASVV |
| | | CLLNNFYPREAKVQWKVDNALQSGNSQESVTEQ |
| | | DSKDSTYSLSSTLTLSKADYEKHKVYACEVTHQ |
| | | GLASSPVTKSFNRGEC |
| | L6-N-HC | >L6-N-HC appended ScFv-F7B-IgG-RSPO2RA- |
| | appended | Knob-His HC SEQ ID NO: 221 |
| | ScFv-F7B- | EVQLVESGGGLVQPGGSLRLSCAASGFTFTSY |
| | IgG- | YISWVRQAPGKGLEWVAEISPYSGSTYYADSV |
| | RSPO2RA- | KGRFTISADTSKNTAYLQMNSLRAEDTAVYYC |
| | Knob-his + | ALRARPPIRLHPRGSVMDYWGQGTLVTVSSGS |
| | F7B-IgG- | AASGSSGGSSSGADIQMTQSPSSLSASVGDRVTIT |
| | Hole-Flag | CRASQDVSTAVAWYQQKPGKAPKLLIYSASFL |
| | | YSGVPSRFSGSGSGTDFTLTISSLQPEDFATYY |
| | | CQQSYTTPPTFGQGTKVEIKGGGGSGGGGSGG |
| | | GGSEVQLVESGGGLVQPGGSLRLSCAASGFNF |
| | | SSSSIHWVRQAPGKGLEWVAYIYPSYDYTYYA |
| | | DSVKGRFTISADTSKNTAYLQMNSLRAEDTAV |
| | | YYCARGYFYTWGGMDYWGQGTLVTVSSAST |
| | | KGPSVFPLAPSSKSTSGGTAALGCLVKDYFPEPV |
| | | TVSWNSGALTSGVHTFPAVLQSSGLYSLSSVVTV |
| | | PSSSLGTQTYICNVNHKPSNTKVDKKVEPKSCDK |
| | | THTCPPCPAPEAAGGPSVFLFPPKPKDTLMISRTP |
| | | EVTCVVVDVSHEDPEVKFNWYVDGVEVHNAKT |
| | | KPREEQYNSTYRVVSVLTVLHQDWLNGKEYKC |
| | | KVSNKALGAPIEKTISKAKGQPREPQVYTLPPSRE |
| | | EMTKNQVSLWCLVKGFYPSDIAVEWESNGPQPEN |
| | | NYKTTPPVLDSDGSFFLYSKLTVDKSRWQQGNV |
| | | FSCSVMHEALHNHYTQKSLSLSPGKGGGGSGGG |
| | | [chemical structure] |
| | | [chemical structure] |
| | | [chemical structure] |
| | | [chemical structure] |
| | | >F7B-IgG-Hole Flag HC SEQ ID NO: 222 |
| | | EVQLVESGGGLVQPGGSLRLSCAASGFNFSSSS |
| | | IHWVRQAPGKGLEWVAYIYPSYDYTYYADSV |
| | | KGRFTISADTSKNTAYLQMNSLRAEDTAVYYC |
| | | ARGYFYTWGGMDYWGQGTLVTVSSASTKGPS |
| | | VFPLAPSSKSTSGGTAALGCLVKDYFPEPVTVSW |
| | | NSGALTSGVHTFPAVLQSSGLYSLSSVVTVPSSSL |
| | | GTQTYICNVNHKPSNTKVDKKVEPKSCDKTHTC |
| | | PPCPAPEAAGGPSVFLFPPKPKDTLMISRTPEVTC |
| | | VVVDVSHEDPEVKFNWYVDGVEVHNAKTKPRE |
| | | EQYNSTYRVVSVLTVLHQDWLNGKEYKCKVSN |
| | | KALGAPIEKTISKAKGQPREPQVYTLPPSREEMT |
| | | KNQVSLSCAVKGFYPSDIAVEWESNGQPENNYK |
| | | TTPPVLDSDGSFFLVSKLTVDKSRWQQGNVFSCS |
| | | VMHEALHNHYTQKSLSLSPGKGSGSDYKDDDD |
| | | K |
| | | >F7B LC SEQ ID NO: 223 |
| | | DIQMTQSPSSLSASVGDRVTITCRASQSVSSAV |
| | | AWYQQKPGKAPKLLIYSASSLYSGVPSRFSGS |
| | | RSGTDFTLTISSLQPEDFATYYCQQYYSLFTFG |
| | | QGTKVEIKRTVAAPSVFIFPPSDEQLKSGTASVV |
| | | CLLNNFYPREAKVQWKVDNALQSGNSQESVTEQ |
| | | DSKDSTYSLSSTLTLSKADYEKHKVYACEVTHQ |
| | | GLSSPVTKSFNRGEC |
| | L6-N-HC | >L6-N-HC appended ScFv-F2I-IgG-RSPO2RA-Knob- |
| | appended | His HC SEQ ID NO: 224 |
| | ScFv-F2I- | EVQLVESGGGLVQPGGSLRLSCAASGFTFTSY |
| | IgG- | YISWVRQAPGKGLEWVAEISPYSGSTYYADSV |
| | RSPO2RA- | KGRFTISADTSKNTAYLQMNSLRAEDTAVYYC |
| | Knob-his + | ALRARPPIRLHPRGSVMDYWGQGTLVTVSSGS |
| | F2I-IgG- | AASGSSGGSSSGADIQMTQSPSSLSASVGDRVTIT |
| | Hole-Flag | CRASQDVSTAVAWYQQKPGKAPKLLIYSASFL |
| | | YSGVPSRFSGSGSGTDFTLTISSLQPEDFATYY |
| | | CQQSYTTPPTFGQGTKVEIKGGGGSGGGGSGG |
| | | GGSEVQLVESGGGLVQPGGSLRLSCAASGFNI |
| | | HSSSIHWVRQAPGKGLEWVAATYSSFGSITYA |
| | | DSVKGRFTISADTSKNTAYLQMNSLRAEDTAV |
| | | YYCARYHHPFGYALDYWGQGTLVTVSSASTK |
| | | GPSVFPLAPSSKSTSGGTAALGCLVKDYFPEPVT |
| | | VSWNSGALTSGVHTFPAVLQSSGLYSLSSVVTVP |
| | | SSSLGQGTYICNVNHKPSNTKVDKKVEPKSCDKT |
| | | HTCPPCPAPEAAGGPSVFLFPPKPKDTLMISRTPE |
| | | VTCVVVDVSHEDPEVKFNWYVDGVEVHNAKTK |
| | | PREEQYNSTYRVVSVLTVLHQDWLNGKEYKCK |
| | | VSNKALGAPIEKTISKAKGQPREPQVYTLPPSREE |
| | | MTKNQVSLWCLVKGFYPSDIAVEWESNGQPENN |
| | | YKTTPPVLDSDGSFFLYSKLTVDKSRWQQGNVF |
| | | SCSVMHEALHNHYTQKSLSLSPGKGGGGSGGGG |
| | | [chemical structure] |
| | | [chemical structure] |
| | | [chemical structure] |
| | | [chemical structure] |
| | | >F2I-IgG-Hole Flag HC SEQ ID NO: 225 |
| | | EVQLVESGGGLVQPGGSLRLSCAASGFNIHSSS |
| | | IHWVRQAPGKGLEWVAATYSSFGSITYADSVK |
| | | GRFTISADTSKNTAYLQMNSLRAEDTAVYYCA |
| | | RYHHPFGYALDYWGQGTLVTVSSASTKGPSVF |
| | | PLAPSSKSTSGGTAALGCLVKDYFPEPVTVSWNS |
| | | GALTSGVHTFPAVLQSSGLYSKSSVVTVPSSSLGT |
| | | QTYICNVNHKPSNTKVDKKVEPKSCDKTHTCPP |
| | | CPAPEAAGGPSVFLFPPKPKDTLMISRTPEVTCVV |
| | | VDVSHEDPEVKFNWYVDGVEVHNAKTKPREEQ |
| | | YNSTYRVVSVLTVLHQDWLNGKEYKCKVSNKA |
| | | LGAPIEKTISKAKGQPREPQVYTLPPSREEMTKN |
| | | QVSLSCAVKGFYPSDIAVEWESNGQPENNYKTTP |
| | | PVLDSDGSFFLVSKLTVDKSRWQQGNVFSCSVM |
| | | HEALHNHYTQKSLSLSPGKGSGSGDYKDDDDK |
| | | >F2I LC SEQ ID NO: 226 |
| | | DIQMTQSPSSLSASVGDRVTITCRASQSVSSAV |
| | | AWYQQKPGKAPKLLIYSASSLYSGVPSRFSGS |
| | | RSGTDFTLTISSLQPEDFATYYCQQBVYLFTFG |
| | | QGTKVEIKRTVAAPSVFIFPPSDEQLKGTASVV |
| | | CLLNNFYPREAKVQWKVDNALQSGNSQESVTEQ |
| | | DSKDSTYSLSSTLTLSKADYEKHKVYACEVTHQ |
| | | GLSSVTKSFNRGEC |
| RSPO2RA-N-LC-ScFv-IgG | RSPO2RA- | RSPO2RA-F12578 LC SEQ ID NO: 227 |
| | L6-F12578 | [chemical structure] |
| | | [chemical structure] |
| | | [chemical structure] |
| | | SGGGGSGGGGSDIELTQPPSVSVAPGQTARISCSGDN |
| | | IGSFYVHWYQQKPGQAPVLVIYDKSNRPSGIPERFSG |
| | | SNSGNTATLTISGTQAEDEADYYCQSYANTLSLVFGG |
| | | GTKLTVLGQPKAAPSVTLFPPSSEELQANKATLVCLI |
| | | SDFYPGAVTVAWKADSSPVKAGVETTTPSKQSNNKYA |
| | | ASSYLSLTPEQWKSHRSYSCQVTHEGSTVEKTVAPTE |
| | | CS |
| | | L6_F12578 HC SEQ ID NO: 228 |
| | | EVQLVESGGGGLVQPGGGSLRLSCAASGFTFTSYYISWV |
| | | RQAPGKGLEWVAEISPYSGSTYYADSVKGRFTISADT |
| | | SKNTAYLQMNSLRAEDTAVYYCALRARPPIRLHPRGS |
| | | VMDYWGQGTLVTVSSGSAASGSSGGSSSGADIQMTQS |
| | | PSSLSASVGDRVTITCRASQDVSTAVAWYQQKPGKAP |
| | | KLLIYSASFLYSGVPSRFSGSGSGTDFTLTISSLQPE |
| | | DFATYYCQQSYTTPPTFGQGTKVEIKGGGGSGGGGSG |
| | | GGGSEVQLVESGGGLVQPGGSLRLSCAASGFTFSHYT |
| | | LSWVRQAPGKGLEWVSVISGDGSYTYYADSVKGRFTI |
| | | SSDNSKNTLYLQMNSLRAEDTAVYYCARNFIKYVFAN |
| | | WGQGTLVTVSSASTKGPSVFPLAPSSKSTSGGTAALG |
| | | CLVKDYFPEPVTVSWNSGALTSGVHTFPAVLQSSGLY |
| | | SLSSVVTVPSSSLGTQTYICNVNHKPSNTKVDKKVEP |
| | | KSCDKTHTCPPCPAPEAAGGPSVFLFPPKPKDTLMIS |
| | | RTPEVTCVVVDVSHEDPEVKFNWYVDGVEVHNAKTKP |
| | | REEQYNSTYRVVSVLTVLHQDWLNGKEYKCKVSNKAL |
| | | GAPIEKTISKAKGQPREPQVYTLPPSREEMTKNQVSL |
| | | TCLVKGFYPSDIAVEWESNGQPENNYKTTPPVLDSDG |
| | | SFFLYSKLTVDKSRWQQGNVSCSVMHEALHNHYTQK |
| | | SLSLSPGK |
| RSPO2RA-N-LC-ScFv-IgG | RSPO2RA- | RSPO2RA-F127 LC SEQ ID NO: 229 |
| | L6-F127 | [chemical structure] |
| | | [chemical structure] |
| | | [chemical structure] |
| | | SGGGGSGGGGSDIQMTQSPSSLSASVGDRVTITCRAS |
| | | QSVSSAVAWYQQKPGKAPKLLIYSASSLYSGVPSRFS |
| | | GSRSGTDFTLTISSLQPEDFATYYCQQYWYGVAPITF |
| | | GQGTKVEIKRTVAAPSVFIFPPSDEQLKSGTASVVCL |
| | | LNNFYPREAKVQWKVDNALQSGNSQESVTEQDSKDST |
| | | YSLSSTLTLSKADYEKHKVYACEVTHQGLGGPVTKSF |
| | | NRGEC |
| | | L6_F127 HC SEQ ID NO: 230 |
| | | EVQLVESGGGLVQPGGSLRLSCAASGFTFTSYYISWV |
| | | RQAPGKGLEWVAEISPYSGSTYYADSVKGRFTISADT |
| | | SKNTAYLQMNSLRAEDTAVYYCALRARPPIRLHPRGS |
| | | VMDYWGQGTLVTVSSGSAASGSSGGSSSGADIQMTQS |
| | | PSSLSASVGDRVTITCRASQDVSTAVAWYQQKPGKAP |
| | | KLLIYSASFLYSGVPSRFSGSGSGTDFTLTISSLQPE |
| | | DFATYYCQQSYTTPPTFGQGTKVEIKGGGGSGGGGSG |
| | | GGGSEVQLVESGGGLVQPGGSLRLSCAASGFNISSSY |
| | | IHWVRQAPGKGLEWVAYIYSSYGSTYYADSVKGRFTI |
| | | SADTSKNTAYLQMNSLRAEDTAVYYCARASWYALDYW |
| | | GQGTLVTVSSASTKGPSVFPLAPSSKSTSGGTAALGC |
| | | LVKDYFPEPVTVSWNSGALTSGVHTFPAVLQSSGLYS |
| | | LSSVVTVPSSSLGTQTYICNVNHKPSNTKVDKKVEPK |
| | | SCDKTHTCPPCPAPEAAGGPSVFLFPPKPKDTLMISR |
| | | TPEVTCVVVDVSHEDPEVKFNWYVDGVEVHNAKTKPR |
| | | EEQYNSTYRVVSVLTVLHQDWLNGKEYKCKVSNKALG |
| | | APIEKTISKAKGQPREPQVYTLPPSREEMTKNQVSLT |
| | | CLVKGFYPSDIAVEWESNGQPENNYKTTPPVLDSDGS |
| | | FFLYSKLTVDKSRWQQGNVFSCSVMHEALHNHYTQKS |
| | | LSLSPGK |
| RSPO2RA-N-LC-ScFv-IgG | RSPO2RA- | RSPO2RA-F58 LC SEQ ID NO: 231 |
| | L6-F58 | [chemical structure] |
| | | [chemical structure] |
| | | [chemical structure] |
| | | SGGGGSGGGGSDIQMTQSPSSLSASVGDRVTITCRAS |
| | | QSVSSAVAWYQQKPGKAPKLLIYSASSLYSGVPSRFS |
| | | GSRSGTDFTLTISSLQPEDFATYYCQQWYSSGHVLIT |
| | | FGQGTKVEIKRTVAAPSVFIFPPSDEQLKSGTASVVC |
| | | LLNNFYPREAKVQWKVDNALQSGNSQESVTEQDSKDS |
| | | TYSLSSTLTLSKADYEKHKVYACEVTHQGLSSPVTKS |
| | | FNREC |
| | | L6_F58 HC SEQ ID NO: 232 |
| | | EVQLVESGGGLVQPGGSLRLSCAASGFTFTSYYISWV |
| | | RQAPGKGLEWVAEISPYSGSTYYADSVKGRFTISADT |
| | | SKNTAYLQMNSLRAEDTAVYYCALRARPPIRLHPRGS |
| | | VMDYGQGTLVTVSSGSAASGSSGGSSSGADIQMTQS |
| | | PSSLSASVGDRVTITCRASQDVSTAVAWYQQKPGKAP |
| | | KLLIYSASFLYSGVPSRFSGSGSGTDFTLTISSLQPE |
| | | DFATYYCQQSYTTPPTFGQGTKVEIKGGGGSGGGGSG |
| | | GGGSEVQLVESGGGLVQPGGSLRLSCAASGFNISYSY |
| | | IHWVRQAPGKGLEWVASIYSSSGSTSYADSVKGRFTI |
| | | SADTSKNTAYLQMNSLRAEDTAVYYCARGAIDYWGQG |
| | | TLVTVSSASTKGPSVFPLAPSSKSTSGGTAALGCLVK |
| | | DYFPEPVTVSWNSGALTSGVHTFPAVLQSSGLYSLSS |
| | | VVTVPSSSLGTQTYICNVNHKPSNTKVDKKVEPKSCD |
| | | KTHTCPPCPAPEAAGGPSVFLFPPKPKDTLMISRTPE |
| | | VTCVVVDVSHEDPEVKFNWYVDGVEVHNAKTKPREEQ |
| | | YNSTYRVVSVLTVLHQDWLNGKEYKCKVSNKALGAPI |
| | | EKTISKAKGQPREPQVYTLPPSREEMTKNQVSLTCLV |
| | | KGFYPSDIAVEWESNGQPENNYKTTPPVLDSDGSFFL |
| | | YSKLTVDKSRWQQGNVFSCSVMHEALHNHYTQKSLSL |
| | | SPGK |
| RSPO2RA-N-LC-ScFv-IgG | RSPO2RA- | RSPO2RA-F4-2 LC SEQ ID NO: 233 |
| | L6-F4-2 | [chemical structure] |
| | | [chemical structure] |
| | | [chemical structure] |
| | | SGGGGSGGGGSDIQMTQSPSSLSASVGDRVTITCRAS |
| | | QSVSSAVAWYQQKPGKAPKLLIYSASSLYSGVPSRFS |
| | | GSRSGTDFTLTISSLQPEDFATYYCQQSYAAYLFTFG |
| | | QGTKVEIKRTVAAPSVFIFPPSDEQLKSGTASVVCLL |
| | | NNFYPREAKVQWKVDNALQSGNSQESVTEQDSKDSTY |
| | | SLSSTLTLSKADYEKHKVYACEVTHQGLSSPVTKSFN |
| | | RGEC |
| | | L6-F4-2 HC SEQ ID NO: 234 |
| | | EVQLVESGGGLVQPGGSLRLSCAASGFTFTSYYISWV |
| | | RQAPGKGLEWVAEISPYSGSTYYADSVKGRFTISADT |
| | | SKNTAYLQMNSLRAEDTAVYYCALRARPPIRLHPRGS |
| | | VMDYWGQGTLVTVSSGSAASGSSGGSSSGADIQMTQS |
| | | PSSLSASVGDRVTITCRASQDVSTAVAWYQQKPGKAP |
| | | KLLIYSASFLYSGVPSRFSGSGSGTDFTLTISSLQPE |
| | | DFATYYCQQSYTTPPTFGQGTKVEIKGGGGSGGGGSG |
| | | GGGSEVQLVESGGGLVQPGGSLRLSCAASGFNISYYY |
| | | IHWVRQAPGKGLEWVASIYPSSGYTYYADSVKGRFTI |
| | | SADTSKNTAYLQMNSLRAEDTAVYYCARSSFYWAMDY |
| | | WGQGTLVTVSSASTKGPSVFPLAPSSKSTSGGTAALG |
| | | CLVDKDYFPEPVTVSWNSGALTSGVHTFPAVLQSSGLY |
| | | SLSSVVTVPSSSLGTQTLYICNVNHKPSNTKVDKKVEP |
| | | KSCDKTHTCPPCPAPEAAGGPSVFLFPPKPKDTLMIS |
| | | RTPEVTCVVVDVSHEDPEVKFNWYDGVEVHNAKTKP |
| | | REEQYNSTYRVVSVLTVLHQDWLNGKEYKCKVSNKAL |
| | | GAPIEKTISKAKGQPREPQVYTLPPSREEMTKNQVSL |
| | | TCLVKGFYPSDIAVEWESNGQPENNYKTTPPVLDSDG |
| | | SFFLYSKLTVDKSRWQQGNVFSCSVMHEALHNHYTQK |
| | | SLSLSPGK |
| RSPO2RA-N-LC-ScFv-IgG | RSPO2RA- | RSPO2RA-F4 LC SEQ ID NO: 235 |
| | L6-F4 | [chemical structure] |
| | | [chemical structure] |
| | | [chemical structure] |
| | | SGGGGSGGGGSDIQMTQSPSSLSASVGDRVTITCRAS |
| | | QSVSSAVAWYQQKPGKAPKLLIYSASSLYSGVPSRFS |
| | | GSRSGTDFTLTISSLQPEDFATYYCQQWYYAPITFGQ |
| | | GTKVEIKRTVAAPSVFIFPPSDEQLKSGTASVVCLLN |
| | | NFYPREAKVQWKVDNALQSGNSQESVTEQDSKDSTYS |
| | | LSSTLTLSKADYEKHKVYACEVTHQGLSSPVTKSFNR |
| | | GEC |
| | | L6-F4 HC SEQ ID NO: 236 |
| | | EVQLVESGGGGLVQPGGSL4LSCAASGFTFTSYYISWY |
| | | RQAPGKGLEWVAEISPYSGSTYYADSVKGRFTISADT |
| | | SKNTAYLQMNSLRAEDTAVYYCALRARPPIRLHPRGS |
| | | VMDYWGQGTLVTVSSGSAASGSSGGSSSGADIQMTQS |
| | | PSSLSASVGDRVTITCRASQDVSTAVAWYQQKPGKAP |
| | | KLLIYSASFLYSGVPSRFSGSGSGTDFTLTISSLQPE |
| | | DFATYYCQQSYTTPPTFGQGTKVEIKGGGGSGGGGSG |
| | | GGGSEVQLVESGGGLVQPGGSLRLSCAASGFNLSSYS |
| | | MHWVRQAPGKGLEWVAYISSYYGYTYYADSVKGRFTI |
| | | SADTSKNTAYLQMNSLRAEDTAVYYCARPAPGHWGFD |
| | | YWGQGTLVTVSSASTKGPSVFPLAPSSKSTSGGTAAL |
| | | GCLVKDYFPEPVTVSWNSGALTSGVHTFPAVLQSSGL |
| | | YSLSSVVTVPSSSLGTQTYICNVNHKPSNTKVDKKVE |
| | | PKSCDKTHTCPPCPAPEAAGGPSVFLFPPKPKDTLMI |
| | | SRTPEVTCVVVDVSHEDPEVKFNWYVDGVEVHNAKTK |
| | | PREEQYNSTYRVVSVLTVLHQDWLNGKEYKCKVSNKA |
| | | LGAPIEKTISKAKGQPREPQVYTLPPSREEMTKNQVS |
| | | LTCLVKGFYPSDIAVEWESNGQPENNYKTTPPVLDSD |
| | | GSFFLYSKLTVDKSRWQQGNVFSCSVMHEALHNHYTQ |
| | | KSLSLSPGK |
| RSPO2RA-N-LC-ScFv-IgG | RSPO2RA- | RSPO2RA-F49 LC SEQ ID NO: 237 |
| | L6-F49 | [chemical structure] |
| | | [chemical structure] |
| | | [chemical structure] |
| | | SGGGGSGGGGSDIQMTQSPSSPSASVGDRVTITCRAS |
| | | QSISSYLNWYQQKPGKAPKLLIYAASSLQSGVPSRFS |
| | | GSGSGTDFTLTISSLQPEDFATYYCQQSYSTPLTFGG |
| | | GTKVEIKRTVAAPSVFIFPPSDEQLKSGTASVVCLLN |
| | | NFYPREAKVQWKVDNALQSGNSQESVTEQDSKDSTYS |
| | | LSSTLTLSKADYEKHKVYACEVTHQGLSSPVTKSFNR |
| | | GEC |
| | | L6-F49 HC SEQ ID NO: 238 |
| | | EVQLVESGGGLVQPGGSLRLSCAASGFTFTSYYISWV |
| | | RQAPGKGLEWVAEISPYSGSTYYADSVKGRFTISADT |
| | | SKNTAYLQMNSLRAEDTAVYYCALRARPPIRLHPRGS |
| | | VMDYWGQGTLVTVSSGSAASGSSGGSSSGADIQMTQS |
| | | PSSLSASVGDRVTITCRASQDVSTAVAWYQQKPGKAP |
| | | KLLIYSASFLYSGVPSRFSGSGSGTDFTLTISSLQPE |
| | | DFATYYCQQSYTTPPTFGQGTKVEIKGGGGSGGGGSG |
| | | GGGSQVQLVQSGAEVKKPGASVKVSCKASGGTFSSYA |
| | | ISWVRQAPGQGLEWMGWINAGNGNTTYAQKFQGRVTM |
| | | TRDTSTSTVYMELSSLRSEDTAVYYCARHYYGSGSYP |
| | | DWGQGTLVTVSSASTKGPSVFPLAPSSKSTSGGTAAL |
| | | GCLVKDYFPEPVTVSWNSGALTSGVHTFPAVLQSSGL |
| | | YSLSSVVTVPSSSLGTQTYICNVNHKPSNTKVDKKVE |
| | | PKSCDKTHTCPPCPAPEAAGGPSVFLFPPKPKDTLMI |
| | | SRTPEVTCVVVDVSHEDPEVKFNWYDGVEVHNAKTK |
| | | PREEQYNSTYRVVSVLTVLHQDWLNGKEYKCKVSNKA |
| | | LGAPIEKTISKAKGQPREPQVYTLPPSREEMTKNQVS |
| | | LTCLVKGFYPSDIAVEWESNGQPENNYKTTPPVLDSD |
| | | GSFFLYSKLTVDKSRWQQGNVFSCSVMHEALHNHYTQ |
| | | KSLSLSPGK |
| RSPO2RA-N-LC-ScFv-IgG | RSPO2RA- | RSPO2RA-F49 LC SEQ ID NO: 239 |
| | L6-F49 | [chemical structure] |
| | | [chemical structure] |
| | | [chemical structure] |
| | | SGGGGSGGGGSDIQMTQSPSSPSASVGDRVTITCRAS |
| | | QSISSYLNWYLQQKPGKAPKLLIYAASSLQSGVPSRFS |
| | | GSGSGTDFTLTISSLQPEDFATYYCQQSYSTPLTFGG |
| | | GTKVEIKRTVAAPSVFIFPPSDEQLKSGTASVVCLLN |
| | | NFYPREAKVQWKVDNALQSGNSQESVTEQDSKDSTYS |
| | | LSSTLTLSKADYEKHVYACEVTHQGLSSPVTKSFNR |
| | | GEC |
| | | L6-F49 HC SEQ ID NO: 240 |
| | | EVQLVESGGGLVQPGGSLRLSCAASGFTFTSYYISWV |
| | | RQAPGKGLEWVAEISPYSGSTYYADSVKGRFTISADT |
| | | SKNTAYLQMNSLRAEDTAVYYCALRARPPIRLHPRGS |
| | | VMDYWGQGTLVTVSSGSAASGSSGGSSSSGADIQMTQS |
| | | PSSLSASVGDRVTITCRASQDVSTAVAWYQQKPGKAP |
| | | KLLIYSASFLYSGVPSRFSGSGSGTDFTLTISSLQPE |
| | | DFATYYCQQSYTTPPTFGQGTKVEIKGGGGSGGGGSG |
| | | GGGSQVQLVQSGAEVKKPGASVKVSCKASGGTFSSYA |
| | | ISWVRQAPGQGLEWMGWINAGNGNTTYAQKFQGRVTM |
| | | TRDTSTSTVYMELSSLRSEDTAVYYCARGYYGSGSYP |
| | | DWGQGTLVTVSSASTKGPSVFPLAPSSKSTSGGTAAL |
| | | GCLVKDYFPEPVTVSWNSGALTSGVHTFPAVLQSSGL |
| | | YSLSSVVTVPSSSLGTQTYICNVNHKPSNTKVDKKVE |
| | | PKSCDKTHTCPPCPAPEAAGGPSVFLFPPKPKDTLMI |
| | | SRTPEVTCVVVDVSHEDPEVKFNWYVDGVEVHNAKTK |
| | | PREEQYNSTYRVVSVLTVLHQDWLNGKEYKCKVSNKA |
| | | LGAPIEKTISKAKGQPREPQVYTLPPSREEMTKNQVS |
| | | LTCLVKGFYPSDIAVEWESNGQPENNYKTTPPVLDSD |
| | | GSFFLYSKLTVDKSRWQQGNVFSCSVMHEALHNHYTQ |
| | | KSLSLSPGK |
| RSPO2RA-N-LC-ScFv-IgG | RSPO2RA- | RSPO2RA-F49 LC SEQ ID NO: 241 |
| | L6-F49 | [chemical structure] |
| | | [chemical structure] |
| | | [chemical structure] |
| | | SGGGGSGGGGSDIQMTQSPSSPSASVGDRVTITCRAS |
| | | QSISSYLNWYQQKPGKAPKLLIYAASSLQSGVPSRFS |
| | | GSGSGTDFTLTISSLQPEDFATYYCQQSYSTPLTFGG |
| | | GTKVEIKRTVAAPSVFIFPPSDEQLKSGTASVVCLLN |
| | | NFYPREAKVQWKVDNALQSGNQESVTEQDSKDSTYS |
| | | LSSTLTLSKADYEKHKVYACEVTHQGLGGPVTKSFNR |
| | | GEC |
| | | L6-F49 HC SEQ ID NO: 242 |
| | | EVQLVESGGGLVQPGGSLRLSCAASGFTFTSYYISWV |
| | | RQAPGKGLEWVAEISPYSGSTYYADSVKGRFTISADT |
| | | SKNTAYLQMNSLRAEDTAVYYCALRARPPIRLHPRGS |
| | | VMDYWGQGTLVTVSSGSAASGSSGGSSSGADIQMTQS |
| | | PSSLSASVGDRVTITCRASQDVSTAVAWYQQKPGKAP |
| | | KLLIYSASFLYSGVPSRFSGSGSGTDFTLTISSLQPE |
| | | DFATYYCQQSYTTPPTFGQGTKVEIKGGGGSGGGGSG |
| | | GGGSQVQLVQSGAEVKKPGASVKVSCKASGGTFSSYA |
| | | ISWVRQAPGQGLEWMGWINAGNGNTTYAQKFQGRVTM |
| | | TRDTSTSTVYMELSSLRSEDTAVYYCARHYYGSGSYP |
| | | DWGQGTLVTVSSASTKGPSVFPLAPSSKSTSGGTAAL |
| | | GCLVKDYFPEPVTVSWNSGALTSGVHTFPAVLQSSGL |
| | | YSLSSVVTVPSSSLGTQTYICNVNHKPSNTKVDKKVE |
| | | PKSCDKTHTCPPCPAPEAAGGPSVFLFPPKPKDTLMI |
| | | SRTPEVTCVVVDVSHEDPEVKFNWYDGVEVHNAKTK |
| | | PREEQYNSTYRVVSVLTVLHQDWLNGKEYKCKVSNKA |
| | | LGAPIEKTISKAKGQPREPQVYTLPPSREEMTKNQVS |
| | | LTCLVKGFYPSDIAVEWESNGQPENNYKTTPPVLDSD |
| | | GSFFLYSKLTVDKSRWQQGNVFSCSVMHEALHNHYTQ |
| | | KSLSLSPGK |
| RSPO2RA-N-LC-ScFv-IgG | RSPO2RA- | RSPO2RA-F10 LC SEQ ID NO: 243 |
| | L6-F10 | [chemical structure] |
| | | [chemical structure] |
| | | [chemical structure] |
| | | SGGGGSGGGGSELTQPPSVSVSPGQTARITCSGDGSY |
| | | AGSYYYGWYQQKPGQAPVTLIYYNNKRPSGIPERFSG |
| | | SLSGSTNTLTISGVQAEDEADYYCGSADNSGAAFGGG |
| | | TKLTVLRTVAAPSVFIFPPSDEQLKSGTASVVCLLNN |
| | | FYPREAKVQWKVDNALQSGNSQESVTEQDSKDSTYSL |
| | | SSTLTLSKADYEKHKVYACEVTHQGLSSPVTKSFNRG |
| | | EC |
| | | L6-F10 HC SEQ ID NO: 244 |
| | | EVQLVESGGGLVQPGGSLRLSCAASGFTFTSYYISWV |
| | | RQAPGKGLEWVAEISPYSGSTYYADSVKGRFTISADT |
| | | SKNTAYLQMNSLRAEDTAVYYCALRARPPIRLHPRGS |
| | | VMDYWGQGTLVTVSSGSAASGSSGGSSSGADIQMTQS |
| | | PSSLSASVGDRVTITCRASQDVSTAVAWYQQKPGKAP |
| | | KLLIYSASFLYSGVPSRFSGSGSGTDFTLTISSLQPE |
| | | DFATYYCQQSYTTPPTFGQGTKVEIKGGGGSGGGGSG |
| | | GGGSEVQLVESGGGLVQPGGSLRLSCAASGFTFSSFN |
| | | MFWVRQAPGKGLEWVAGIDDDGSYPNYGSAVKGRATI |
| | | SRDNSKNTLYLQMNSLRAEDTAVYYCAKSGYGGSWGG |
| | | YIADDIDAWGQGTLVTVSSASTKGPSVFPLAPSSKST |
| | | SGGTAALGCLVKDYFPEPVTVSWNSGALTSGVHTFPA |
| | | VLQSSGLYSLSSVVTVPSSSLGTQTYICNVNHKPSNT |
| | | KVDKKVEPKSCDKTHTCPPCPAPEAAGGPSVFLFPPK |
| | | PKDTLMISRTPEVTCVVVDVSHEDPEVKFNWYDGVE |
| | | VHNAKTKPREEQYNSTYRVVSVLTVLHQDWLNGKEYK |
| | | CKVSNKALGAPIEKTISKAKGQPREPQVYTLPPSREE |
| | | MTKNQVSLTCLVKGFYPSDIAVEWESNGQPENNYKTT |
| | | PPVLDSDGSFFLYSKLTVDKSRWQQGNVFSCSVMHEA |
| | | LHNHTYQKSLSLSPGK |
| RSPO2RA-N-LC-ScFv-IgG | RSPO2RA- | RSPO2RA-F2I SEQ ID NO: 245 |
| | L6-F2I | [chemical structure] |
| | | [chemical structure] |
| | | [chemical structure] |
| | | SGGGGSGGGGSDIQMTQSPSSLSASVGDRVTITCRAS |
| | | QSVSSAVAWYQQKPGKAPKLLIYSASSLYSGVPSRFS |
| | | GSRSGTDFTLTISSLQPEDFATYYCQQGVYLFTFGQG |
| | | TKVEIKRTVAAPSVFIFPPSDEQLKSGTASVVCLLNN |
| | | FYPREAKVQWKVDNALQSGNSQESVTEQDSKDSTYSL |
| | | SSTLTLSKADYEKHKVYACEVTHQGLSSPVTKSFNRG |
| | | EC |
| | | L6-F2I HC SEQ ID NO: 246 |
| | | EVQLVESGGGLVQPGGSLRLSCAASGFTFTSYYISWV |
| | | RQAPGKGLEWVAEISPYSGSTYYADSVKGRFTISADT |
| | | SKNTAYLQMNSLRAEDTAVYYCALRARPPIRLHPRGS |
| | | VMDYWGQGTLVTVSSGSAASGSSGGSSSGADIQMTQS |
| | | PSSLSASVGDRVTITCRASQDVSTAVAWYQQKPGKAP |
| | | KLLIYSASFLYSGVPSRFSGSGSGTDFTLTISSLQPE |
| | | DFATYYCQQSYTTPPTFGQGTKVEIKGGGGSGGGGSG |
| | | GGGSEVQLVESGGGLVQPGGSLRLSCAASGFNIHSSS |
| | | IHWVRQAPGKGLEWVAATYSSFGSITYADSVKGRFTI |
| | | SADTSKNTAYLQMNSLRAEDTAVYYCARYHHPFGYAL |
| | | DYWGQGTLVTVSSASTKGPSVFPLAPSSKSTSGGTAA |
| | | LGCLVKDYFPEPVTVSWNSGALTSGVHTFPAVLQSSG |
| | | LYSLSSVVTVPSSSLGTQTYICNVNHKPSNTKVDKKV |
| | | EPKSCDKTHTCPPCPAPEAAGGPSVFLFPPKPKDTLM |
| | | ISRTPEVTCVVVDVSHEDPEVKFNWYDGVEVHNAKT |
| | | KPREEQYNSTYRVVSVLTVLHQDWLNGKEYKCKVSNK |
| | | ALGAPIEKTISKAKGQPREPQVYTLPPSREEMTKNQV |
| | | SLTCLVKGFYPSDIAVEWESNGQPENNYKTTPPVLDS |
| | | DGSFFLYSKLTVDKSRWQQGNVFSCSVMHEALHNHYT |
| | | QKSLSLSPGK |
| RSPO2RA-N-LC-ScFv-IgG | RSPO2RA- | RSPO2RA-F7B-LC SEQ ID NO: 247 |
| | L6-F7B | [chemical structure] |
| | | [chemical structure] |
| | | [chemical structure] |
| | | SGGGGSGGGGSDIQMTQSPSSLSASVGDRVTITCRAS |
| | | QSVSSAVAWYQQKPGKAPKLLIYSASSLYSGVPSRFS |
| | | GSRSGTDFTLTISSLQPEDFATYYCQQYYSLFTFGQG |
| | | TKVEIKRTVAAPSVFIFPPSDEQLKSGTASVVCLLNN |
| | | FYPREAKVQWKVDNALQSGNSQESVTEQDSKDSTYSL |
| | | SSTLTLSKADYEKHKVYACEVTHQGLSSPVTKSFNRG |
| | | EC |
| | | L6-F7B HC SEQ ID NO: 248 |
| | | EVQLVESGGGLVQPGGSLRLSCAASGFTFTSYYISWV |
| | | RQAPGKGLEWVAEISPYSGSTYYADSVKGRFTISADT |
| | | SKNTAYLQMNSLRAEDTAVYYCALRARPPIRLHPRGS |
| | | VMDYWGQGTLVTVSSGSAASGSSGGSSSSGADIQMTQS |
| | | PSSLSASVGDRVTITCRASQDVSTAVAWYQQKPGKAP |
| | | KLLIYSASFLYSGVPSRFSGSGSGTYDFTLTISSLQPE |
| | | DFATYYCQQSYTTPPTFGQGTKVEIKGGGGSGGGGSG |
| | | GGGSEVQLVESGGGLVQPGGSLRLSCAASGFNFSSSS |
| | | IHWVRQAPGKGLEWVAYIYPSYDYTYYADSVKGRFTI |
| | | SADTSKNTAYLQMNSLRAEDTAVYYCARGYFYTWGGM |
| | | DYWGQGTLVTVSSASTKGPSVFPLAPSSKSTSGGTAA |
| | | LGCLVKDYFPEPVTVSWNSGALTSGVHTFPAVLQSSG |
| | | LYSLSSVVTVPSSSLGTQTYICNVNHKPSNTKVDKKV |
| | | EPKSCDKTHTCPPCPAPEAAGGPSVFLFPPKPKDTLM |
| | | ISRTPEVTCVVVDVSHEDPEVKFNWYVDGVEVHNAKT |
| | | KPREEQYNSTYRVVSVLTVLHQDWLNGKEYKCKVSNK |
| | | ALGAPIEKTISKAKGQPREPQVYTLPPSREEMTKNQV |
| | | SLTCLVKGFYPSDIAVEWESNGQPENNYKTTPPVLDS |
| | | DGSFFLYSKLTVDKSRWQQGNVFSCSVMHEALHNHYT |
| | | QKSLSLSPGK |
| [chemical structure] | RSPO2RA- L6-F12578 | RSPO2RA-L6-F12578 HC SEQ ID NO: 249 [chemical structure] [chemical structure] [chemical structure] SGGGGSGGGGSEVQLVESGGGLVQPGGSLRLSCAASG FTFTSYYISWVRQAPGKGLEWVAEISPYSGSTYYADS VKGRFTISADTSKNTAYLQMNSLRAEDTAVYYCALRA RPPIRLHPRGSVMDYWGQGTLVTVSSGGGGSGGGGSG GGGSEVQLVESGGGLVQPGGGSLRLSCAASGFTFSHYT LSWVRQAPGKGLEWVSVISGDGSYTYYADSVKGRFTI SSDNDKNTLYLQMNSLRAEDTAVYYCARNFIKYVFAN |
| | | WGQGTLVTVSSASTKGPSVFPLAPSSKSTSGGTAALG |
| | | CLVKDYFPEPVTVSWNSGALTSGVHTFPAVLQSSGLY |
| | | SLSSVVTVPSSSLGTQTYICNVNHKPSNTKVDKKVEP |
| | | KSCDKTHTCPPCPAPEAAGGPSVFLFPPKPKDTLMIS |
| | | RTPEVTCVVVDVSHEDPEVKFNWYVDGVEVHNAKTKP |
| | | REEQYNSTYRVVSVLTVLHQDWLNGKEYKCKVSNKAL |
| | | GAPIEKTISKAKGQPREPQVYTLPPSREEMTKNQVSL |
| | | TCLVKGFYPSDIAVEWESNGQPENNYKTTPPVLDSDG |
| | | SFFLYSKLTVDKSRWQQGNVFSCSVMHEALHNHTYQK |
| | | SLSLSPGK |
| | | L6-F12578 LC SEQ ID NO: 250 |
| | | DIQMTQSPSSLSASVGDRVTITCRASQDVSTAVAWYQ |
| | | QKPGKAPKLLIYSASFLYSGVPSRFSGSGSGTDFTLT |
| | | ISSLQPEDFATYYCQQSYTTPPTFGQGTKVEIKGGGG |
| | | SGGGGSGGGGSDIELTQPPSVSVAPGQTARISCSGDN |
| | | IGSFYVHWYQQKPGQAPVLVIYDKSNRPSGIPERFSG |
| | | SNSGNTATLTISGTQAEDEADYYCQSYANTLSLVFGG |
| | | GTKLTVLGQPKAAPSVTLFPPSSEELQANKATLVCLI |
| | | SDFYPGAVTVAWKADSSPVKAGVETTTPSKQSNNKYA |
| | | ASSYLSLTPEQWKSHRSYSCQVTHEGSTVEKTVAPTE |
| | | CS |
| RSPO2RA-N-HC-Fv-IgG | RSPO2RA- | RSPO2RA-L6-F127 HC SEQ ID NO: 251 |
| | L6-F127 | [chemical structure] |
| | | [chemical structure] |
| | | [chemical structure] |
| | | SGGGGSGGGGSEVQLVESGGGLVQPGGSLRLSCAASG |
| | | FTFTSYYISWVRQAPGKGLEWVAEISPYSGSTYYADS |
| | | VKGRFTISADTSKNTAYLQMNSLRAEDTAVYYCALRA |
| | | RPPIRLHPRGSVMDYWGQGTLVTVSSGGGGSGGGGSG |
| | | GGGSEVQLVESGGGLVQPGGSLRLSCAASGFNISSSY |
| | | IHWVRQAPGKGLEWVAYIYSSYGSTYYADSVKGRFTI |
| | | SADTSKNTAYLQMNSLRAEDTAVYYCARASWYALDYW |
| | | GQGTLVTVSSASTKGPSVFPLAPSSKSTSGGTAALGC |
| | | LVKDYFPEPVTVSWNSGALTSGVHTFPAVLQSSGLYS |
| | | LSSVVTVPSSSLGTQTYICNVNHKPSNTKVDKKVEPK |
| | | SCDKTHTCPPCPAPEAAGGPSVFLFPPKPKDTLMISR |
| | | TPEVTCVVVDVSHEDPEVKFNWYVDGVEVHNAKTKPR |
| | | EEQYNSTYRVVSVLTVLHQDWLNGKEYKCKVSNKALG |
| | | APIEKTISKAKGQPREPQVYTLPPSREEMTKNQVSLT |
| | | CLVKGFYPSDIAVEWESNGQPENNYKTTPPVLDSDGS |
| | | FFLYSKLTVDKSRWQQGNVFSCSVMHEALHNHYTQKS |
| | | LSLSPGK |
| | | L6-F127 LC SEQ ID NO: 252 |
| | | DIQMTQSPSSLSASVGDRVTITCRASQDVSTAVAWYQ |
| | | QKPGKAPKLLIYSASFLYSGVPSRFSGSGSGTDFTLT |
| | | ISSLQPEDFATYYCQQSYTTPPTFGQGTKVEIKGGGG |
| | | SGGGGSGGGGSDIQMTQSPSSLSASVGDRVTITCRAS |
| | | QSVSSAVAWYQQKPGKAPKLLIYSASSLYSGVPSRFS |
| | | GSRSGTDFTLTISSLQPEDFATYYCQQYWYGVAPITF |
| | | GQGTKVEIKRTVAAPSVFIFPPSDEQLKSGTASVVCL |
| | | LNNFYPREAKVQWKVDNALQSGNSQESVTEQDSKDST |
| | | YSLSSTLTLSKADYEKHKVYACEVTHQGLSSPVTKSF |
| | | NRGEC |
| RSPO2RA-N-HC-Fv-IgG | RSPO2RA- | RSPO2RA-L6-F58 HC SEQ ID NO: 253 |
| | L6-F58 | [chemical structure] |
| | | [chemical structure] |
| | | [chemical structure] |
| | | SGGGGSGGGGSEVQLVESGGGLVQPGGSLRLSCAASG |
| | | FTFTSYYISWVRQAPGKGLEWVAEISPYSGSTYYADS |
| | | VKGRFTISADTSKNTAYLQMNSLRAEDTAVYYCALRA |
| | | RPPIRLHPRGSVMDYWGQGTLVTVSSGGGGSGGGGSG |
| | | GGGSEVQLVESGGGLVQPGGSLRLSCAASGFNISYSY |
| | | IHWVRQAPGKGLEWVASIYSSSGSTSYADSVKGRFTI |
| | | SADTSKNTAYLQMNSLRAEDTAVYYCARGAIDYWGQG |
| | | TLVTVSSASTKGPSVFPLAPSSKSTSGGTAALGCLVK |
| | | DYFPEPVTVSWNSGALTSGVHTFPAVLQSSGLYSLSS |
| | | VVTVPSSSLGTQTYICNVNHKPSNTKVDKKVEPKSCD |
| | | KTHTCPPCPAPEAAGGPSVFLFPPKPKDTLMISRTPE |
| | | VTCVVVDVSHEDPEVKFNWYVDGVEVHNAKTPREEQ |
| | | YNSTYRVVSVLTVLHQDWLNGKEYKCKVSNKALGAPI |
| | | EKTISKAKGQPREPQVYTLPPSREEMTKNQVSLTCLV |
| | | KGFYPSDIAVEWESNGQPENNYKTTPPVLDSDGSFFL |
| | | YSKLTVDKSRWQQGNVFSCSVMHEALHNHYTQKSLSL |
| | | SPGK |
| | | L6-F58 LC SEQ ID NO: 254 |
| | | DIQMTQSPSSLSASVGDRVTITCRASQDVSTAVAWYQ |
| | | QKPGKAPKLLIYSASFLYSGVPSRFSGSGSGTDFTLT |
| | | ISSLQPEDFATYYCQQSYTTPPTFGQGTKVEIKGGGG |
| | | SGGGGSGGGGSDIQMTQSPSSLSASVGDRVTITCRAS |
| | | QSVSSAVAWYQQKPGKAPKLLIYSASSLYSGVPSRFS |
| | | GSRSGTDFTLTISSLQPEDFATYYCQQWYSSGHVLIT |
| | | FGQGTKVEIKRTVAAPSVFIPPSDEQLKSGTASVVC |
| | | LLNNFYPREAKVQWKVDNALQSGNSQESVTEQDSKDS |
| | | TYSLSSTLTLSKADYEKHKVYACEVTHQGLSSPVTKS |
| | | FNRGEC |
| RSPO2RA-N-HC-Fv-IgG | RSPO2RA- | RSPO2RA-L6-F4-2 HC SEQ ID NO: 255 |
| | L6-F4-2 | [chemical structure] |
| | | [chemical structure] |
| | | [chemical structure] |
| | | SGGGGSGGGGSEVQLVESGGGLVQPGGSLRLSCAASG |
| | | FTFTSYYISWVRQAPGKGLEWVAEISPYSGSTYYADS |
| | | VKGRFTISADTSKNTAYLQMNSLRAEDTAVYYCALRA |
| | | RPPIRLHPRGSVMDYWGQGTLVTVSSGGGGSGGGGSG |
| | | GGGSEVQLVESGGGLVQPGGSLRLSCAASGFNISYYY |
| | | IHWVRQAPGKGLEWVASIYPSSGYTYYADSVKGRFTI |
| | | SADTSKNTAYLQMNSLRAEDTAVYYCARSSFYWAMDY |
| | | WGQGTLVTVSSASTKGPSVFPLAPSSKSTSGGTAALG |
| | | CLVKDYFPEPVTVSWNSGALTSGVHTFPAVLQSSGLY |
| | | SLSSVVTVPSSSLGTQTYICNVNHKPSNTKVDKKVEP |
| | | KSCDKTHTCPPCPAPEAAGGPSVFLFPPKPKDTLMIS |
| | | RTPEVTCVVVDVSHEDPEVKFNWYVDGVEVHNAKTKP |
| | | REEQYNSTYRVVSVLTVLHQDWLNGKEYKCKVSNKAL |
| | | GAPIEKTISKAKGQPREPQVYTLPPSREEMTKNQVSL |
| | | TCLVKGFYPSDIAVEWESNGQPENNYKTTPPVLDSDG |
| | | SFFLYSKLTVDKSRWQQGNVFSCSVMHEALHNHTYQK |
| | | SLSLSPGK |
| | | L6-F4-2 LC SEQ ID NO: 256 |
| | | DIQMTQSPSSLSASVGDRVTITCRASQDVSTAVAWYQ |
| | | QKPGKAPKLLIYSASFLYSGVPSRFSGSGSGTDFTLT |
| | | ISSLQPEDFATYYCQQSYTTPPTFGQGTKVEIKGGGG |
| | | SGGGGSGGGGSDIQMTQSPSSLSASVGDRVTITCRAS |
| | | QSVSSAVAWYQQKPGKAPKLLIYSASSLYSGVPSRFS |
| | | GSRSGTDFTLTISSLQPEDFATYYCQQSYAAYLFTFG |
| | | GTKVEIKRTVAAPSVFIFPPSDEQLKSGTASVVCLL |
| | | NNFYPREAKVQWKVDNALQSGNQESVTEQDSKDSTY |
| | | SLSSTLTLSKADYEKHDKVYACEVTHQGLSSPVTKSFN |
| | | RGEC |
| RSPO2RA-N-HC-Fv-IgG | RSPO2RA- | RSPO2RA-L6-F4 HC SEQ ID NO: 257 |
| | L6-F4 | [chemical structure] |
| | | [chemical structure] |
| | | [chemical structure] |
| | | SGGGGSGGGGSEVQLVESGGGLVQPGGSLRLSCAASG |
| | | FTFTSYYISWVRQAPGKGLEWVAEISPYSGSTYYADS |
| | | VKGRFTISADTSKNTAYLQMNSLRAEDTAVYYCALRA |
| | | RPPIRLHPRGSVMDYWGQGTLVTVSSGGGGSGGGGSG |
| | | GGGSEVQLVESGGGLVQPGGSLRLSCAASGFNLSSYS |
| | | MHWVRQAPGKGLEWVAYISSYYGYTYYADSVKGRFTI |
| | | SADTSKNTAYLQMNSLRAEDTAVYYCARPAPGHWGFD |
| | | YWGQGTLVTVSSASTKGPSVFPLAPSSKSTSGGTAAL |
| | | GCLVKDYFPEPVTVSWNSGALTSGHTFPAVLQSSGL |
| | | YSLSSVVTVPSSSLGTQTYICNVNHKPSNTKVDKKVE |
| | | PKSCDKTHTCPPCPAPEAAGGPSVFLFPPKPKDTLMI |
| | | SRTPEVTCVVVDVSHEDPEVKFNWYVDGVEVHNAKTK |
| | | PREEQYNSTYRVVSVLTVLHQDWLNGKEYKCKVSNKA |
| | | LGAPIEKTISKAKGQPREPQVYTLPPSREEMTKNQVS |
| | | LTCLVKGFYPSDIAVEWESNGQPENNYKTTPPVLDSD |
| | | GSFFLYSKLTVDKSRWQQGNVFSCSVMHEALHNHYTQ |
| | | KSLSLSPGK |
| | | L6-F4 LC SEQ ID NO: 258 |
| | | DIQMTQSPSSLSASVGDRVTITCRASQDVSTAVAWYQ |
| | | QKPGKAPKLLIYSASFLYSGVPSRFSGSGSGTDFTLT |
| | | ISSLQPEDFATYYCQQSYTTPPTFGQGTKVEIKGGGG |
| | | SGGGGSGGGGSDIQMTQSPSSLSASVGDRVTITCRAS |
| | | QSVSSAVAWYQQKPGKAPKLLIYSASSLYSGVPSRFS |
| | | GSRSGTDFTLTISSLQPEDFATYYCQQWYYAPITFGQ |
| | | GTKVEIKRTVAAPSVFIFPPSDEQLKSGTASVVCLLN |
| | | NFYPREAKVQWKVDNALQSGNSQESVTEQDSKDSTYS |
| | | LSSTLTLSKADYEKHKVYACEVTHQGLSSPVTKSFNR |
| | | GEC |
| RSPO2RA-N-HC-Fv-IgG | RSPO2RA- | RSPO2RA-L6-F49 HC SEQ ID NO: 259 |
| | L6-F49 | [chemical structure] |
| | | [chemical structure] |
| | | [chemical structure] |
| | | SGGGGSGGGGSEVQLVESGGGLVQPGGSLRLSCAASG |
| | | FTFTSYYISWVRQAPGKGLEWVAEISPYSGSTYYADS |
| | | VKGRFTISADTSKNTAYLQMNSLRAEDTAVYYCALRA |
| | | RPPIRLHPRGSVMDYWGQGTLVTVSSGGGGSGGGGSG |
| | | GGGSEVQLVQSGAEVKKPGASVKVSCKASGGTFSSYA |
| | | ISWVRQAPGQGLEWMGWINAGNGNTTYAQKFQGRVTM |
| | | TRDTSTSTVYMELSSLRSEDTAVYYCARHYYGSGSYP |
| | | DWGQGTLVTVSSASTKGPSVFPLAPSSKSTSGGTAAL |
| | | GCLVKDYFPEPVTVSWNSGALTSGVHTFPAVLQSSGL |
| | | YSLSSVVTVPSSSLGTQTYICNVNHKPSNTKVDKKVE |
| | | PKSCDKTHTCPPCPAPEAAGGPSVFLFPPKPKDTLMI |
| | | SRTPEVTCVVVDVSHEDPEVKFNWYDGVEVHNAKTK |
| | | PREEQYNSTYRVVSVLTVLHQDWLNGKEYKCKVSNKA |
| | | LGAPIEKTISKAKGQPREPQVYTLPPSREEMTKNQVS |
| | | LTCLVKGFYPSDIAVEWESNGQPENNYKTTPPVLDSD |
| | | GSFFLYSKLTVDKSRWQQGNVFSCSVMHEALHNHYTQ |
| | | KSLSLSPGK |
| | | L6-F49 LC SEQ ID NO: 260 |
| | | DIQMTQSPSSLSASVGDRVTITCRASQDVSTAVAWYQ |
| | | QKPGKAPKLLIYSASFLYSGVPSRFSGSGSGTDFTLT |
| | | ISSLQPEDFATYYCQQSYTTPPTFGQGTKVEIKRGGG |
| | | GSGGGGSGGGGSDIQMTQSPSSPSASVGDRVTITCRA |
| | | SQSISSYLNWYQQKPGKAPKLLIYAASSLQSGVPSRF |
| | | SGSGSGTDFTLTISSLQPEDFATYYCQQSYSTPLTFG |
| | | GGTKVEIKRTVAAPSVFIFPPSDEQLKSGTASVVCLL |
| | | NNFYPREAKVQWKVDNALQSGNSQESVTEQDSKDSTY |
| | | SLSSTLTLSKADYEKHKVYACEVTHQGLSSPVTKSFN |
| | | RGEC |
| RSPO2RA-N-HC-Fv-IgG | RSPO2RA- | RSPO2RA-L6-F10 HC SEQ ID NO: 261 |
| | L6-F10 | [chemical structure] |
| | | [chemical structure] |
| | | [chemical structure] |
| | | SGGGGSGGGGSEVQLVESGGGLVQPGGSLRLSCAASG |
| | | FTFTSYYISWVRQAPKGLEWVAEISPYSGSTYYADS |
| | | VKGRFTISADTSKNTAYLQMNSLRAEDTAVYYCALRA |
| | | RPPIRLHPRGSVMDYWGQGTLVTVSSGGGGSGGGGSG |
| | | GGGSEVQLVESGGGLVQPGGSLRLSCAASGFTFSSFN |
| | | MFWVRQAPGKGLEWVAGIDDDGSYPNYGSAVKGRATI |
| | | SRDNSKNTLYLQMNSLRAEDTAVYYCAKSGYGGSWGG |
| | | YIADDIDAWGQGTLVTVSSASTKGPSVFPLAPSSKST |
| | | SGGTAALGCLVKDYFPEPVTVSWNSGALTSGVHTFPA |
| | | VLQSSGLYSLSSVVTVPSSSLGTQTYICNVNHKPSNT |
| | | KVDKKVEPKSCDKTHTCPPCPAPEAAGGPSVFLFPPK |
| | | PKDTLMISRTPEVTCVVVDVSHEDPEVKFNWYVDGVE |
| | | VHNAKTKPREEQYNSTYRVVSVLTVLHQDWLNGKEYK |
| | | CKVSNKALGAPIEKTISKAKGQPREPQVYTLPPSREE |
| | | MTKNQVSLTCLVDKGFYPSDIAVEWESNGQPENNYKTT |
| | | PPVLDSDGSFFLYSKLTVDKSRWQQGNVFSCSVMHEA |
| | | LHNHYTQKSLSLSPGK |
| | | L6-F10 LC SEQ ID NO: 262 |
| | | DIQMTQSPSSLSASVGDRVTITCRASQDVSTAVAWYQ |
| | | QKPGKAPKLLIYSASFLYSGVPSRFSGSGSGTDFTLT |
| | | ISSLQPEDFATYYCQQSYTTPPTFGQGTKVEIKGGGG |
| | | SGGGGSGGGGSELTQPPSVSVSPGQTARITCSGDGSY |
| | | AGSYYYGWYQQKPGQAPVTLIYYNNKRPSGIPERFSG |
| | | SLSGSTNTLTISGVQAEDEADYYCGSADNSGAAFGGG |
| | | TKLTVLRTVAAPSVFIFPPSDEQLKSGTASVVCLLNN |
| | | FYPREAKVQWKVDNALQSGNSQESVTEQDSKDSTYSL |
| | | SSTLTLSKADYEKHKVYACEVTHQGLSSPVTKSFNRG |
| | | EC |
| RSPO2RA-N-HC-Fv-IgG | RSPO2RA- | RSPO2RA-L6-F2I HC SEQ ID NO: 263 |
| | L6-F2I | [chemical structure] |
| | | [chemical structure] |
| | | [chemical structure] |
| | | SGGGGSGGGGSEVQLVESGGGLVQPGGSLRLSCAASG |
| | | FTFTSYYISWVRQAPGKGLEWVAEISPYSGSTYYADS |
| | | VKGRFTISADTSKNTAYLQMNSLRAEDTAVYYCALRA |
| | | RPPIRLHPRGSVMDYWGQGTLVTVSSGGGGSGGGGSG |
| | | GGGSEVQLVESGGGLVQPGGSLRLSCAASGFNIHSSS |
| | | IHWVRQAPGKGLEWVAATYSSFGSITYADSVKGRFTI |
| | | SADTSKNTAYLQMNSLRAEDTAVYYCARYHHHPFGYAL |
| | | DYWGQGTLVTVSSASTKGPSVFPLAPSSKSTSGGTAA |
| | | LGCLVKDYFPEPVTVSWNSGALTSGVHTFPAVLQSSG |
| | | LYSLSSVVTVPSSSLGTQTYICNVNHKPSNTKVDKKV |
| | | EPKSCDKTHTCPPCPAPEAAGGPSVFLFPPKPKDTLM |
| | | ISRTPEVTCVVVDVSHEDPEVKFNWYVDGVEVHNAKT |
| | | KPREEQYNSTYRVVSVLTVLHQDWLNGKEYKCKVSNK |
| | | ALGAPIEKTISKAKGQPREPQVYTLPPSREEMTKNQV |
| | | SLTCLVKGFYPSDIAVEWESNGQPENNYKTTPPVLDS |
| | | DGSFFLYSKLTVDKSRWQQGNVFSCSVMHEALHNHYT |
| | | QKSLSLSPGK |
| | | L6-F2I LC SEQ ID NO: 264 |
| | | DIQMTQSPSSLSASVGDRVTITCRASQDVSTAVAWYQ |
| | | QKPGKAPKLLIYSASFLYSGVPSRFSGSGSGTDFTLT |
| | | ISSLQPEDFATYYCQQSYTTPPTFGQGTKVEIKRGGG |
| | | GSGGGGSGGGGSDIQMTQSPSSLSASVGDRVTITCRA |
| | | SQSVSSAVAWYQQKPGKAPKLLIYSASSLYSGVPSRF |
| | | SGSRSGTDFTLTISSLQPEDFATYYCQQGVYLFTFGQ |
| | | GTKVEIKRTVAAPSVFIFPPSDEQLKSGTASVVCLLN |
| | | NFYPREAKVQWKVDNALQSGNASQESVTEQDSKDSTYS |
| | | LSSTLTLSKADYEKHKVYACEVTHQGLSSPVTKSFNR |
| | | GEC |
| RSPO2RA-N-HC-Fv-IgG | RSPO2RA- | RSPO2RA-L6-F7B HC SEQ ID NO: 265 |
| | L6-F7B | [chemical structure] |
| | | [chemical structure] |
| | | [chemical structure] |
| | | SGGGGSGGGGSEVQLVESGGGLVQPGGSLRLSCAASG |
| | | FTFTSYYISWVRQAPGKGLEWVAEISPYSGSTYYADS |
| | | VKGRFTISADTSKNTAYLQMNSLRAEDTAVYYCALRA |
| | | RPPIRLHPRGSVMDYWGQGTLVTVSSGGGGSGGGGSG |
| | | GGGSEVQLVESGGGLVQPGGSLRLSCAASGFNFSSSS |
| | | IHWVRQAPGKGLEWVAYIYPSYDYTYYADSVKGRFTI |
| | | SADTSKNTAYLQMNSLRAEDTAVYYCARGYFYTWGGM |
| | | DYWGQGTLVTVSSASTKGPSVFPLAPSSKSTSGGTAA |
| | | LGCLVKDYFPEPVTVSWNSGALTSGVHTFPAVLQSSG |
| | | LYSLSSVVTVPSSSLGTQTYICNVNHKPSNTKVDKKV |
| | | EPKSCDKTHTCPPCPAPEAAGGPSVFLFPPKPKDTLM |
| | | ISRTPEVTCVVVDVSHEDPEVKFNWYVDGVEVHNAKT |
| | | KPREEQYNSTYRVVSVLTVLHQDWLNGKEYKCKVSNK |
| | | ALGAPIEKTISKAKGQPREPQVYTLPPSREEMTKNQV |
| | | SLTCLVKGFYPSDIAVEWESNGQPENNYKTTPPVLDS |
| | | DGSFFLYSKLTVDKSRWQQGNVFSCSVMHEALHNHYT |
| | | QKSLSLSPGK |
| | | L6-F7B LC SEQ ID NO: 266 |
| | | DIQMTQSPSSLSASVGDRVTITCRASQDVSTAVAWYQ |
| | | QKPGKAPKLLIYSASFLYSGVPSRFSGSGSGTDFTLT |
| | | ISSLQPEDFATYYCQQSYTTPPTFGQGTKVEIKRGGG |
| | | GSGGGGSGGGGSDIQMTQSPSSLSASVGDRVTITCRA |
| | | SQSVSSAVAWYQQKPGKAPKLLIYSASSLYSGVPSRF |
| | | SGSRSGTDFTLTISSLQPEDFATYYCQQYYSLFTFGQ |
| | | GTKVEIKRTVAAPSVFIFPPSDEQLKSGTASVVCLLN |
| | | NFYPREAKVQWKVDNALQSGNSQESVTEQDSKDSTYS |
| | | LSSTLTLSKADYEKHKVYACEVTHQGLSSPVTKSFNR |
| | | GEC |
| [chemical structure] | RSPO2RA- L6-F12578 | RSPO2RA-L6-F12578 LC SEQ ID NO: 267 [chemical structure] [chemical structure] [chemical structure] SGGGGSGGGGSDIQMTQSPSSLSASVGDRVTITCRAS QDVSTAVAWYQQKPGKAPKLLIYSASFLYSGVPSRFS GSGSGTDFTLTISSLQPEDFATYYCQQSYTTPPTFGQ GTKVEIKGGGGSGGGGSGGGGSDIELTQPPSVSVAPG QTARISCSGDNIGSFYVHWYQQKPGQAPVLVIYDKSN RPSGIPERFSGSNSGNTATLTISGTQAEDEADYYCQS YANTLSLVFGGGTKLTVLGQPKAAPSVTLFPPSSEEL |
| | | QANKATLVCLISDFYPGAVTVAWKADSSPVKAGVETT |
| | | TPSKQSNNKYAASSYLSLTPEQWKSHRSYSCQVTHEG |
| | | STVEKTVAPTECS |
| | | L6-F12578 HC SEQ ID NO: 268 |
| | | EVQLVESGGGLVQPGGSLRLSCAASGFTFTSYYISWV |
| | | RQAPGKGLEWVAEISPYSGSTYYADSVKGRFTISADT |
| | | SKNTAYLQMNSLRAEDTAVYYCALRARPPIRLHPRGS |
| | | VMDYWGQGTLVTVSSGGGGSGGGGSGGGGSEVQLVES |
| | | GGGGLVQPGGSLRLSCAASGFTFSHYTLSWVRQAPGKG |
| | | LEWVSVISGDGSYTYYADSVKGRFTISSDNSKNTLYL |
| | | QMNSLRAEDTAVYYCARNFIKYVFANWGQGTLVTVSS |
| | | ASTKGPSVFPLAPSSKSTSGGTAALGCSLVKDYFPEPV |
| | | TVSWNSGALTSGVHTFPAVLQSSGLYSLSSVVTVPSS |
| | | SLGTQTYICNVNHKPSNTKVDKKVEPKSCDKTHTCPP |
| | | CPAPEAAGGPSVFLFPPKPKDTLMISRTPEVTCVVVD |
| | | VSHEDPEVKFNWYVDGVEVHNAKTKPREEQYNSTYRV |
| | | VSVLTVTLHQDWLNGKEYKCKVSNKALGAPIEKTISDKA |
| | | KGQPREPQVYTLPPSREEMTKNQVSLTCLVKGFYPSD |
| | | IAVEWESNGQPENNYKTTPPVLDSDGSFFLYSKLTVD |
| | | KSRWQQGNVFSCSVMHEALHNHYTQKSLSLSPGK |

| | | |
|---|---|---|
| RSPO2RA-N-LC-Fv-IgG | LSPO2RA- | RSPO2RA-L6-F127 LC SEQ ID NO: 269 |
| | L6-F127 | [chemical structure] |

| | | |
|---|---|---|
| | | [chemical structure] |
| | | [chemical structure] |
| | | SGGGGSGGGGSDIQMTQSPSSLSASVGDRVTITCRAS |
| | | QDVSTAVAWYQQKPGKAPKLLIYSASFLYSGVPSRFS |
| | | GSGSGTDFTLTISSLQPEDFATYYCQQSYTTPPTFGQ |
| | | GTKVEIKGGGGSGGGGSGGGGSDIQMTQSPSSLSASV |
| | | GDRVTITCRASQSVSSAVAWYQQKPGKAPKLLIYSAS |
| | | SLYSGVPSRFSGSRSGTDFTLTISSLQPEDFATYYCQ |
| | | QYWYGVAPITFGQGTKVEIKRTVAAPSVFIFPPSDEQ |
| | | LKSGTASVVCLLNNFYPREAKVQWKVDNALQSGNSQE |
| | | SVTEQDSKDSTYSLSSTLTLSKADYEKHKVYACEVTH |
| | | QGLSSPVTKSFNRGEC |
| | | L6-F127 HC SEQ ID NO: 270 |
| | | EVQLVESGGGLVQPGGSLRLSCAASGFTFTSYYISWV |
| | | RQAPGKGLEWVAEISPYSGSTYYADSVKGRFTISADT |
| | | SKNTAYLQMNSLRAEDTAVYYCALRARPPIRLHPRGS |
| | | VMDYWGQGTLVTVSSGGGGSGGGGSGGGGSEVQLVES |
| | | GGGLVQPGGSLRLSCAASGFNISSSYIHWVRQAPGKG |
| | | LEWVAYIYSSYGSTYYADSVKGRFTISADTSKNTAYL |
| | | QMNSLRAEDTAVYYCARASWYALDYWGQGTLVTVSSA |
| | | STKGPSVFPLAPSSKSTSGGTAALGCLVKDYFPEPVT |
| | | VSWNSGALTSGVHTFPAVLQSSGLYSLSSVVTVPSSS |
| | | LGTQTYICNVNHKPSNTKVDKKVEPKSCDKTHTCPPC |
| | | PAPEAAGGPSVFLFPPKPKDTLMISRTPEVTCVVVDV |
| | | SHEDPEVKFNWYVDGVEVHNAKTKPREEQYNSTYRVV |
| | | SVLTVLHQDWLNGKEYKCKVSNKALGAPIEKTISKAK |
| | | GQPREPQVYTLPPSREEMTKNQVSLTCLVKGFYPSDI |
| | | AVEWESNGQPENNYKTTPPVLDSDGSFFLYSLKLTVDK |
| | | SRWQQGNVFSCSVMHEALHNHYTQKSLSLSPGK |
| RSPO2RA-N-LC-Fv-IgG | RSPO2RA- | RSPO2RA-L6-F58 LC SEQ ID NO: 271 |
| | L6-F58 | [chemical structure] |
| | | [chemical structure] |
| | | [chemical structure] |
| | | SGGGGSGGGGSDIQMTQSPSSLSASVGDRVTITCRAS |
| | | QDVSTAVAWYQQKPGKAPKLLIYSASFLYSGVPSRFS |
| | | GSGSGTDFTLTISSLQPEDFATYYCQQSYTTPPTFGQ |
| | | GTKVEIKGGGGSGGGGSGGGGSDIQMTQSPSSLSASV |
| | | GDRVTITCRASQSVSSAVAWYQQKPGKAPKLLIYSAS |
| | | SLYSGVPSRFSGSRSGTDFTLTISSLQPEDFATYYCQ |
| | | QWYSSGHVLITFGQGTKVEIKRTVAAPSVFIFPPSDE |
| | | QLKSGTASVVCLLNNFYPREAKVQWKVDNALQSGNSQ |
| | | ESVTEQDSKDSTYSLSSTLTLSKADYEKHKVYACEVT |
| | | HQGLSSPVTKSFNRGEC |
| | | L6-F58 HC SEQ ID NO: 272 |
| | | EVQLVESGGGLVQPGGSLRLSCAASGFTFTSYYISWV |
| | | RQAPGKGLEWVAEISPYSGSTYYADSVKGRFTISADT |
| | | SKNTAYLQMNSLRAEDTAVYYCALRARPPIRLHPRGS |
| | | VMDYWGQGTLVTVSSGGGGSGGGGSGGGGSEVQLVES |
| | | GGGLVEQPGGSLRLSCAASGFNISYSYIHWVRQAPGKG |
| | | LEWVASIYSSSGSTSYADSVKGRFTISADTSKNTAYL |
| | | QMNSLRAEDTAVYYCARGAIDYWGQGTLVTVSSASTK |
| | | GPSVFPLAPSSKSTSGGTAALGCLVKDYFPEPVTVSW |
| | | NSGALTSGVHTFPAVLQSSGLYSLSSVVTVPSSSLGT |
| | | QTYICNVNHKPSNTKVDKKVEPKSCDKTHTCPPCPAP |
| | | EAAGGPSVFLFPPKPKDTLMISRTPEVTCVVVDVSHE |
| | | DPEVKFNWYDGVEVHNAKTKPREEQYNSTYRVVSVL |
| | | TVLHQDWLNGKEYKCKVSNKALGAPIEKTISKAKGQP |
| | | REPQVYTLPPSREEMTKNQVSLTCLVKGFYPSDIAVE |
| | | WESNGQPENNYKTTPPVLDSDGSFFLYSKLTVDKSRW |
| | | QQGNVFSCSVMHEALHNHYTQKSLSLSPGK |
| RSPO2RA-N-LC-Fv-IgG | RSPO2RA- | RSPO2RA-L6-F4-2 LC SEQ ID NO: 273 |
| | L6-F4-2 | [chemical structure] |
| | | [chemical structure] |
| | | [chemical structure] |
| | | SGGGGSGGGGDIQMTQSPSSLSASVGDRVTITCRASQ |
| | | DVSTAVAWYQQKPGKAPKLLIYSASFLYSGVPSRFSG |
| | | SGSGTDFTLTISSLQPEDFATYYCQQSYTTPPTFGQG |
| | | TKVEIKGGGGSGGGGSGGGGSDIQMTQSPSSLSASVG |
| | | DRVTITCRASQSVSSAVAWYGGKPGKAPKLLIYSASS |
| | | LYSGVPSRFSGSRSGTDFTLTISSLQPEDFATYYCQQ |
| | | SYAAYLFTFGQGTKVEIKRTVAAPSVFIFPPSDEQLK |
| | | SGTASVVCLLNNFYPREAKVQWKVDNALQSGANSQESV |
| | | TEQDSKDSTYSLSSTLTLSKADYEKHKVYACEVTHQG |
| | | LSSPVTKSFNRGEC |
| | | L6-F4-2 HC SEQ ID NO: 274 |
| | | EVQLVESGGGLVQPGGSLRLSCAASGFTFTSYYISWV |
| | | RQAPGKGLEWVAEISPYSGSTYYADSVKGRFTISADT |
| | | SKNTAYLQMNSLRAEDTAVYYCALRARPPIRLHPRGS |
| | | VMDYWGQGTLVTVSSGGGGSGGGGSGGGGSEVQLVES |
| | | GGGLVQPGGSLRLSCAASGFNISYYYIHWVRQAPGKG |
| | | LEWVASIYPSSGYTYYADSVKGRFTISADTSKNTAYL |
| | | QMNSLRAEDTAVYYCARSSFYWAMDYWGQGTLVTVSS |
| | | ASTKGPSVFPLAPSSKSTSGGTAALGCLVKDYFPEPV |
| | | TVSWNSGALTSGVHTFPAVLQSSGLYSLSSVVTVPSS |
| | | SLGTQTYICNVNHKPSNTKVDKKVEPKSCDKTHTCPP |
| | | CPAPEAAGGPSVFLFPPKPKDTLMISRTPEVTCVVVD |
| | | VSHEDPEVKFNWYVDGVEVHNAKTKPREEQYNSTYRV |
| | | VSVLTVLHQDWLNGKEYKCKVSNKALGAPIEKTISKA |
| | | KGQPREPQVYTLPPSREEMTKNQVSLTCLVKGFYPSD |
| | | IAVEWESNGQPENNYKTTPPVLDSDGSFFLYSKLTVD |
| | | KSRWQQGNVFSCSVMHEALHNHYTQKSLSLSPGK |
| RSPO2RA-N-LC-Fv-IgG | RSPO2RA- | RSPO2RA-L6-F4 LC SEQ ID NO: 275 |
| | L6-F4 | [chemical structure] |
| | | [chemical structure] |
| | | [chemical structure] |
| | | SGGGGSGGGGSDIQMTQSPSSLSASVGDRVTITCRAS |
| | | QDVSTAVAWYQQKPGKAPKLLIYSASFLYSGVPSRFS |
| | | GSGSGTDFTLTISSLQPEDFATYYCQQSYTTPPTFGQ |
| | | GTKVEIKGGGGSGGGGSGGGGSDIQMTQSPSSLSASV |
| | | GDRVTITCRASQSVSSAVAWYQQKPGKAPKLLIYSAS |
| | | SLYSGVPSRFSGSRSGTDFTLTISSLQPEDFATYYCQ |
| | | QWYYAPITFGQGTKVEIKRTVAAPSVFIFPPSDEQLK |
| | | SGTASVVCLLNNFYPREAKVQWKVDNALQSGNSQESV |
| | | TEQDSKDSTYSLSSTLTLSKADYEKHKVYACEVTHQG |
| | | LSSPVTKSFNRGEC |
| | | L6-F4 HC SEQ ID NO: 276 |
| | | EVQLVESGGGLVQPGGSLRLSCAASGFTFTSYYISWV |
| | | RQAPGKGLEWVAEISPYSGSTYYADSVKGRFTISADT |
| | | SKNTAYLQMNSLRAEDTAVYYCALRARPPIRLHPRGS |
| | | VMDYWGQGTLVTVSSGGGGSGGGGSGGGGSEVQLVES |
| | | GGGLVQPGGSLRLSCAASGFNLSSYSMHWVRQAPGKG |
| | | LEWVAYISSYYGYTYYADSVKGRFTISADTSKNTAYL |
| | | QMNSLRAEDTAVYYCARPAPGHWGFDYWGQGTLVTVS |
| | | SASTKGPSVFPLAPSSKSTSGGTAALGCLVKDYFPEP |
| | | VTVSWNSGALTSGVHTFPAVLQSSGLYSLSSVVTVPS |
| | | SSLGTQTYICNVNHKPSNTKVDKKVEPKSCDKTHTCP |
| | | PCPAPEAAGGPSVFLFPPKPKDTLMISRTPEVTCVVV |
| | | DVSHEDPEVKFNWYVDGVEVHNAKTKPREEQYNSTYR |
| | | VVSVLTVLHQDWLNGKEYKCKVSNKALGAPIEKTISK |
| | | AKGQPREPQVYTLPPSREEMTKNQVSLTCLVKGFYPS |
| | | DIAVEWESNGQPENNYKTTPPVLDSDGSFFLYSKLTV |
| | | DKSRWQQGNVFSCSVMHEALHNHYTQKSLSLSPGK |
| RSPO2RA-N-LC-Fv-IgG | RSPO2RA- | RSPO2RA-L6-F49 LC SEQ ID NO: 277 |
| | L6-F49 | [chemical structure] |
| | | [chemical structure] |
| | | [chemical structure] |
| | | SGGGGSGGGGSDIQMTQSPSSLSASVGDRVTITCRAS |
| | | QDVSTAVAWYQQKPGKAPKLLIYSASFLYSGVPSRFS |
| | | GSGSGTDFTLTISSLQPEDFATYYCQQSYTTPPTFGQ |
| | | GTKVEIKRGGGGSGGGGSGGGGSDIQMTQSPSSPSAS |
| | | VGDRVTITCRASQSISSYLNWYQQKPGKAPKLLIYAA |
| | | SSLQSGVPSRFSGSGSGTDFTLTISSLQPEDFATYYC |
| | | QQSYSTPLTFGGGGTKVEIKRTVAAPSVFIFPPSDEQL |
| | | KSGTASVVCLLNNFYPREAKVQWKVDNALQSGNSQES |
| | | VTEQDSKDSTYSLSSTLTLSKADYEKHKVYACEVTHQ |
| | | GLSSPVTKSFNRGEC |
| | | L6-F49 HC SEQ ID NO: 278 |
| | | EVQLVESGGGLVQPGGSLRLSCAASGFTFTSYYISWV |
| | | RQAPGKGLEWVAEISPYSGSTYYADSVKGRFTISADT |
| | | SKNTAYLQMNSLRAEDTAVYYCALRARPPIRLHPRGS |
| | | VMDYWGQGTLVTVSSGGGGSGGGGSGGGGSEVQLVQS |
| | | GAEVKKPGASVKVSCKASGGTFSSYAISWVRQAPGQG |
| | | LEWMGWINAGNGNTTYAQKFQGRVTMTRDTSTSTVYM |
| | | ELSSLRSEDTAVYYCARGYYGSGSYPDWGQGTLVTVS |
| | | SASTKGPSVFPLAPSSKSTSGGTAALGCLVKDYFPEP |
| | | VTVSWNSGALTSGVHTFPAVLQSSGLYSLSSVVTVPS |
| | | SSLGTQTYICNVNHKPSNTKVDKKVEPKSCDKTHTCP |
| | | PCPAPEAAGGPSVFLFPPKPKDTLMISRTPEVTCVVV |
| | | DVSHEDPEVKFNWYVDGVEVHNAKTKPREEQYNSTYR |
| | | VVSVLTVLHQDWLNGKEYKCKVSNKALGAPIEKTISK |
| | | AKGQPREPQVYTLPPSREEMTKNQVSLTCLVKGFYPS |
| | | DIAVEWESNGQPENNYKTTPPVLDSDGSFFLYSKLTV |
| | | DKSRWQQGNVFSCSVMHEALHNHYTQKSLSLSPGK |
| RSPO2RA-N-LC-Fv-IgG | RSPO2RA- | RSPO2RA-L6-F10 LC SEQ ID NO: 279 |
| | L6-F10 | [chemical structure] |
| | | [chemical structure] |
| | | [chemical structure] |
| | | SGGGGSGGGGSDIQMTQSPSSLSASVGDRVTITCRAS |
| | | QDVSTAVAWYQQKPGKAPKLLIYSASFLYSGVPSRFS |
| | | GSGSGTDFTLTISSLQPEDFATYYCQQSYTTPPTFGQ |
| | | GTKVEIKGGGGSGGGGSGGGGSELTQPPSVSVSPGQT |
| | | ARITCSGDGSYAGSYYYGWYQQKPGQAPVTLIYYNNK |
| | | RPSGIPERFSGSLSGSTNTLTISGVQAEDEADYYCGS |
| | | ADNSGAAFGGGTKLTVLRTVAAPSVFIFPPSDEQLKS |
| | | GTASVVCLLNNFYPREAKVQWKVDNALQSGNGQESVT |
| | | EQDSKDSTYSLSSTLTLSKADYEKHKVYACEVTHQGL |
| | | SSPVTKSFNRGEC |
| | | L6-F10 HC SEQ ID NO: 280 |
| | | EVQLVESGGGLVQPGGSLRLSCAASGFTFTSYYISWV |
| | | RQAPGKGLEWVAEISPYSGSTYYADSVKGRFTISADT |
| | | SKNTAYLQMNSLRAEDTAVYYCALRARPPIRLHPRGS |
| | | VMDYWGQGTLVTVSSGGGGSGGGGSGGGGSEVQLVES |
| | | GGGLVQPGGSLRLSCAASGFTFSSFNMFWVRQAPGKG |
| | | LEWVAGIDDDGSYPNYGSAVKGRATISRDNSKNTLYL |
| | | QMNSLRAEDTAVYYCAKSGYSSSWGGYIADDIDAWGQ |
| | | GTLVTVSSASTKGPSVFPLAPSSKSTSGGTAALGCLV |
| | | KDYFPEPVTVSWNSGALTSGVGTFPAVLQSSGLYSLS |
| | | SVVTVPSSSLGTQTYICNVNHKPSNTKVDKKVEPKSC |
| | | DKTHTCPPCPAPEAAGGPSVFLFPPKPKDTLMISRTP |
| | | EVTCVVVDVSHEDPEVKFNWYVDGVEVHNAKTKPREE |
| | | QYNSTYRVVSVLTVLHQDWLNGKEYKCKVSNKALGAP |
| | | IEKTISKAKGQPREPQVYTLPPSREEMTKNQVSLTCL |
| | | VKGFYPSDIAVEWESNGQPENNYKTTPPVLDSDGSFF |
| | | LYSKLTVDKSRWQQGNVFSCSVMHEALHNHYTQKSLS |
| | | LSPGK |
| RSPO2RA-N-LC-Fv-IgG | RSPO2RA- | RSPO2RA-L6-F2I LC SEQ ID NO: 281 |
| | L6-F7I | [chemical structure] |
| | | [chemical structure] |
| | | [chemical structure] |
| | | SGGGGSGGGGSDIQMTQSPSSLSASVGDRVTITCRAS |
| | | QDVSTAVAWYQQKPGKAPKLLIYSASFLYSGVPSRFS |
| | | GSGSGTDFTLTISSLQPEDFATYYCQQSYTTPPTFGQ |
| | | GTKVEIKRGGGGSGGGGSGGGGSDIQMTQSPSSLSAS |
| | | VGDRVTITCRASQXVXXAVAWYQQKPGKAPKLLIYSA |
| | | SSLYSGVPSRFSGSRSGTDFTLTISSLQPEDFATYYC |
| | | QQGVYLFTFGQGTKVEIKRTVAAPSVFIFPPSDEQLK |
| | | SGTASVVCLLNNFYPREAKVQWKVDNALQSGNSQESV |
| | | TEQDSKDSTYSLSSTLTLSKADYEKHKVYACEVTHQG |
| | | LSSPVTKSFNRGEC |
| | | L6-F2I HC SEQ ID NO: 282 |
| | | EVQLVESGGGLVQPGGSLRLSCAASGFTFTSYYISWV |
| | | RQAPGKGLEWVAEISPYSGSTYYADSVKGRFTISADT |
| | | SKNTAYLQMNSLRAEDTAVYYCALRARPPIRLHPRGS |
| | | VMDYWGQGTLVTVSSGGGGSGGGGSGGGGSEVQLVES |
| | | GGGLVQPGGSLRLSCAASGFNIHSSSIHWVRQAPGKG |
| | | LEWVAATYSSFGSITYADSVKGRFTISADTSKNTAYL |
| | | QMNSLRAEDTAVYYCARYHHPFGYALDYWGQGTLVTV |
| | | SSASTKGPSVFPLAPSSKSTSGGTAALGCLVDKYFPE |
| | | PVTVSWNSGALTSGVHTFPAVLQSSGLYSLSSVVTVP |
| | | SSSLGTQTYICNVNHKPSNTKVDKKVEPKSCDKTHTC |
| | | PPCPAPEAAGGPSVFLFPPKPKDTLMISRTPEVTCVV |
| | | VDVSHEDPEVKFNWYDGVEVHNAKTKPREEQYNSTY |
| | | RVVSVLTVLHQDWLNGKEYKCKVSNKALGAPIEKTIS |
| | | KAKGQPREPQVYTLPPSREEMTKNQVSLTCLVKGFYP |
| | | SDIAVEWESNGQPENNYKTTPPVLDSDGSFFLYSKLT |
| | | VDKSRWQQGNVFSCSVMHEALHNHYTQSLSLSPGK |
| RSPO2RA-N-LC-Fv-IgG | RSPO2RA- | RSPO2RA-L6-F7B LC SEQ ID NO: 283 |
| | L6-F7B | [chemical structure] |
| | | [chemical structure] |
| | | [chemical structure] |
| | | SGGGGSGGGGSDIQMTQSPSSLSASVGDRVTITCRAS |
| | | QDVSTAVAWYQQKPGKAPKLLIYSASFLYSGVPSRFS |
| | | GSGSGTDFTLTISSLQPEDFATYYCQQSYTTPPTFGQ |
| | | GTKVEIKRGGGGSGGGGSGGGGSDIQMTQSPSSLSAS |
| | | VGDRVTITCRASQSVSSAVAWYQQKPGKAPKLLIYSA |
| | | SSLYSGVPSRFSGSRSGTDFTLTISSLQPEDFATYYC |
| | | QQYYSLFTFGQGTKVEIKRTVAAPSVFIFPPSDEQLK |
| | | SGTASVVCLLNNFYPREAKVQWKVDNALQSGNSQESV |
| | | TEQDSKDSTYSLSSTLTLSKADYEKHKVYACEVTHQG |
| | | LSSPVTKSFNRGEC |
| | | L6-F7B HC SEQ ID NO: 284 |
| | | EVQLVESGGGLVQPGGSLRLSCAASGFTFTSYYISWV |
| | | RQAPGKGLEWVAEISPYSGSTYYADSVKGRFTISADT |
| | | SKNTAYLQMNSLRAEDTAVYYCALRARPPIRLHPRGS |
| | | VMDYWGQGTLVTVSSGGGGSGGGGSGGGGSEVQLVES |
| | | GGGLVQPGGSLRLSCAASGFNFSSSSIHWVRQAPGKG |
| | | LEWVAYIYPSYDTYYADSVKGRFTISADTSKNTAYL |
| | | QMNSLRAEDTAVYYCARGYFYTWGGMDYWGQGTLVTV |
| | | SSASTKGPSVFPLAPSSKSTSGGTAALGCLVKDYFPE |
| | | PVTVSWNSGALTSGVHTFPAVLQSSGLYSLSSVVTVP |
| | | SSSLGTQTYICNVNHKPSNTKVDKKVEPKSCDKTHTC |
| | | PPCPAPEAAGGPSVFLFPPKPKDTLMISRTPEVTCVV |
| | | VDVSHEDPEVKFNWYVDGVEVHNAKTKPREEQYNSTY |
| | | RVVSVLTVLHQDWLNGKEYKCKVSNKALGAPIEKTIS |
| | | KAKGQPREPQVYTLPPSREEMTKNQVSLTCLVKGFYP |
| | | SDIAVEWESNGQPENNYKTTPPVLDSDGSFFLYSKLT |
| | | VDKSRWQQGNVFSCSVMHEALHNHYTQKSLSLSPGK |
| [chemical structure] | L6-F4-2- RSPO2RA | L6-F4-2-RSPORA LC SEQ ID NO: 285 DIQMTQSPSSLSASVGDRVTITCRASQDVSTAVAWYQ QKPGKAPLLIYSASFLYSGVPSRFSGSGSGTDFTLT ISSLQPEDFATYYCQQSYTTPPTFGQGTKVEIKGGGG SGGGGSGGGGSDIQMTQSPSSLSASVGDRVTITCRAS QSVSSAVAWYQQKPGKAPKLLIYSASSLYSGVPSRFS GSRSGTDFTLTISSLQPEDFATYYCQQSYAAYLFTFG QGTKVDIKRTVAAPSVFIFPPSDEQLKSGTASVVCLL NNFYPREAKVQWKVDNALQSGNSQESVTEQDSKDSTY SLSSTLTLSKADYEKHKVYACEVTHQGLSSPVTKSFN RGECGGGGSGSGGSGGGGSNPICKGCLSCSKDNGCSR CQQKLFFFLRREGMRQYGECLHSCPSGYYGHRAPDMN RCARCRIENCDSCRDKDACTKCKVGFYLHRGRCFDEC PDGFAPLEETMECVE |
| | | L6-F4-2-5063 HC SEQ ID NO: 286 |
| | | EVQLVESGGGLVQPGGSLRLSCAASGFTFTSYYISWV |
| | | RQAPGKGLEWVAEISPYSGSTYYADSVKGRFTISADT |
| | | SKNTAYLQMNSLRAEDTAVYYCALRARPPIRLHPRGS |
| | | VMDYWGQGTLVTVSSGGGGSGGGGSGGGGSEVQLVES |
| | | GGGLVQPGGSLRLSCAASGFNISYYYIHWVRQAPGKG |
| | | LEWVASIYPSSGYTYYADSVKGRFTISADTSKNTAYL |
| | | QMNSLRAEDTAVYYCARSSFYWAMDYWGQGTLVTVSS |
| | | ASTKGPSVFPLAPSSKSTSGGTAALGCLVKDYFPEPV |
| | | TVSWNSGALTSGVHTFPAVLQSSGLYSLSSVVTVPSS |
| | | SLGTQTYICNVNHKPSNTKVDKKVEPKSCDKTHTCPP |
| | | CPAPEAAGGPSVFLFPPKPKDTLMISRTPEVTCVVVD |
| | | VSHEDPEVKFNWYVDGVEVHNAKTKPREEQYNSTYRV |
| | | VSVLTVLHQDWLNGKEYKCKVSNKALGAPIEKTISKA |
| | | KGPREPQVYTLPPSREEMTKNQVSLTCLVKGFYPSD |
| | | IAVEWESNGQPENNYKTTPPVLDSDGSFFLYSKLTVD |
| | | KSRWQQGNVFSCSVMHEALHNHYTQKSLSLSPGK |
| RSPO2RA C-LC-Fv-IgG | L6-F4- | L6 F4 RSPORA LC SEQ ID NO: 287 |
| | RSPO2RA | DIQMTQSPSSLSASVGDRVTITCRASQDVSTAVAWYQ |
| | | QKPKAPKLLIYSASFLYSGVPSRFSGSGSGTDFTLT |
| | | ISSLQPEDFATYYCQQSYTTPPTFGQGTKVEIKGGGG |
| | | SGGGGSGGGGSDIQMTQSPSSLSASVGDRVTITCRAS |
| | | QSVSSAVAWYQQKPGKAPKLLIYSASSLYSGVPSRFS |
| | | GSRSGTDFTLTISSLQPEDFATYYCQQWYYAPITFGQ |
| | | GTKVEIKRTVAAPSVFIFPPSDEQLKSGTASVVCLLN |
| | | NFYPREAKVQWKVDNALQSGNSQESVTEQDSKDSTYS |
| | | LSSTLTLSKADYEKHKVYACEVTHQGLSSPVTKSFNT |
| | | [chemical structure] |
| | | [chemical structure] |
| | | [chemical structure] |
| | | [chemical structure] |
| | | L6-F4 HC SEQ ID NO: 288 |
| | | EVQLVESGGGLVQPGGSLRLSCAASGFTFTSYYISWV |
| | | RQAPGKGLEWVAEISPYSGSTYYADSVKGRFTISADT |
| | | SKNTAYLQMNSLRAEDTAVYYCALRARPPIRLHPRGS |
| | | VMDYWGQGTLVTVSSGGGGSGGGGSGGGGSEVQLVES |
| | | GGGLVQPGGSLRLSCAASGFNLSSYSMHWVRQAPGKG |
| | | LEWVAYISSYYGYTYYADSVKGRFTISADTSKNTAYL |
| | | QMNSLRAEDTAVYYCARPAPGHWGFDYWGQGTLVTVS |
| | | SASTKGPSVFPLAPSSKSTSGGTAALGCLVKDYFPEP |
| | | VTVSWNSGALTSGVHTFPAVLQSSGLYSLSSVVTVPS |
| | | SSLGTQTYICNVNHKPSNTKVDKKVEPKSCDKTHTCP |
| | | PCPAPEAAGGPSVFLFPPKPKDTLMISRTPEVTCVVV |
| | | DVSHEDPEVKFNWYVDGVEVHNAKTKPREEQYNSTYR |
| | | VVSVLTVLHQDWLNGKEYKCKVSNKALGAPIEKTISK |
| | | AKGQPREPQVYTLPPSREEMTKNQVSLTCLVKGFYPS |
| | | DIAVEWESNGQPENNYKTTPPVLDSDGSFFLYSKLTV |
| | | DKSRWQQGNVFSCSVMHEALHNHYTQKSLSLSPGK |

[chemical structure]

[chemical structure]

Italic underline: linker
Bold: VH or VL
“F” indicates Fzd binder and “aGFP” indicates anti-GFP antibody sequence

[0232] Additional constructs with RSPO2RA fusions with other FZD and LRP binders (e.g., R2M3 (“F6) and 26 (“L2”)) were made having the RSPO2RA fusions at different locations on the IgG molecule. For example, the RSPO2RA protein was fused to C terminus of either the heavy or light chain of the IgG. As shown in FIGS. 3H and 31, all of these FZD-RSPO2RA fusions resulted in RSPO mimetic activity, and additional fusion of a LRP binder resulted in super agonist activity. Therefore, these results demonstrated an approach to generate both RSPO mimetic as well as WNT super-agonists molecules that can target specific subsets of FZD receptors.

[0233] To further evaluate format and stoichiometry between different component, another set of molecules were generated between FZD and LRP binders and RSPO mutant as depicted in FIG. 4A, FIGS. 7 and 8. The activities of these various molecules are shown in FIGS. 4B and 4C.

### Example 3

### WNT Super Agonist Molecules Replace Both WNT and R-Spondin in Organoid Culture Expansion

[0234] Multiple tissues in the mammalian body are maintained by WNT-driven adult stem cells. Short-range Wnt signals are often further enhanced by local secretion of R-spondins. In this role, R-spondin acts as stem cell growth factor, but only in the presence of WNT. This pivotal interplay of WNT agonists in the stem cell niche is recapitulated in adult stem cell-derived organoid cultures. By providing niche signals in the culture medium, organoids can be maintained and expanded as self-organizing structures. Most of the media for epithelial organoid cultures is supplemented with R-spondin. The addition of R-spondin alone is sufficient if organoid cells secrete their own WNT proteins, such as, for example, Paneth cells in murine small intestinal organoids (Sato et al., 2009). Organoid cultures without endogenous WNT source, such as human intestinal organoids, require the addition of WNT's or WNT mimetics (Sato et al., 2011, Janda et al., 2017). Obtaining high quality WNT proteins and/or R-spondins for organoid medium can be laborious and costly. To test whether a single WNT super agonist molecule can replace both WNT and R-spondin in organoid medium, we tested the outgrowth efficiency of several different organoid cultures in the presence of L6-F12578-RSPO2RA.

[0235] We first examined the applicability of WNT super agonist in the expansion of mouse small intestinal organoids. Murine cells were grown in the presence of porcupine inhibitor C59 to block any endogenous WNT secretion. The addition of RSPO1, WNT3A or L6-F12578 alone had little to no effect on the growth of these cells (FIG. 5A, 5B). As expected, WNT3A plus RSPO1 and L6-F12578 plus RSPO1 stimulated the outgrowth of large cystic organoids in seven days. As shown in FIG. 5A-B, the WNT super agonist L6-F12578-RSPO2RA alone at 0.1 nM was enough to stimulate maximal outgrowth. The addition of recombinant RSPO1 did not further enhance proliferation. Next, we looked at human small intestinal organoids, which require both exogenous WNT and RSPO1 in their expansion medium. While human small intestinal organoids had no response to recombinant WNT3A, a slight increase in outgrowth was observed with L6-F12578 alone (FIG. 5C, 5D). Similar as in mouse, the addition of L6-F12578-RSPO2RA alone at 1 nM displayed an activity level that is equivalent to L6-F12578 and RSPO1 combination (FIG. 5C-D). To further investigate the applicability of WNT super agonist in other cell types and tissues, we tested the expansion of mouse hepatocytes and human tubuloids, two culture systems that depend on the presence of R-spondin in their medium (Hu et al., 2018, Schutgens et al., 2019). Similar to the experimental setup for mouse and human intestine, porcupine inhibitor C59 was added to block any endogenous WNT signal and for mouse hepatocytes we additionally removed GSK3 inhibitor CHIR99021 from the base medium. Over the course of 14 days, murine hepatocytes cultured in L6-F12578-RSPO2RA expanded at a higher rate compared to L6-F12578 alone. The addition of recombinant RSPO1 to both conditions further enhanced outgrowth (FIG. 5E, 5F). The added effect of RSPO1 to L6-F12578-RSPO2RA can be due to a differential sensitivity to RSPO1 and RSPO2 but needs further investigation. Human kidney tubuloids cultured in L6-F12578-RSPO2RA alone rapidly expanded within one week to similar levels of the L6-F12578 and RSPO1 combination and outperforming recombinant WNT3A plus RSPO1 or surrogate WNT alone (FIG. 5G, 5H). Taken together, WNT super agonist can replace WNT3A and RSPO in organoids cultures from intestine, liver and kidney for both mouse and human. We expect L6-F12578-RSPO2RA and other WNT super agonists to outperform recombinant WNT, RSPO and WNT- and RSPO-conditioned media for a wide variety of other organoid models.

### Example 4

### In Vivo Effects of WNT Mimetic Molecules

[0236] The effects of WNT mimetic of different FZD specificity has not been fully explored previously. To test the in vivo effect of WNT mimetics with different FZD specificity, the panel of WNT mimetics described in FIG. 1 were dosed at 3 mg per kg intraperitoneally on day 0, 3, 7 and 10 in C57Bl/6J mice. Since we have previously established the effects of FZD1,2,7 WNT mimetics on bone formation in vivo (PCT Publication WO 2019/126398), we tested whether other FZD specificity could also impact bone formation. Compared to baseline at day 0, the whole-body bone mineral densities (BMD) were increased by 39%, 38%, 29% and 11% in the groups of L6-F12578, L6-F127, L6-F58, and L6-F4 at day 13 (P<0.001), respectively (FIG. 6A). Similarly, the BMDs of femur and lumbar were increased up to 60% in the groups of L6-F12578, L6-F127, L6-F58, and L6-F4 at day 13 (P<0.001) (FIG. 6B, C). These data not only confirmed our previous finding that FZD_{1,2,7} specific WNT mimetics induce bone formation, but also suggest that FZD_{5,8} specific WNT mimetics and FZD₄ specific WNT mimetics can also induce bone formation.

[0237] The body weights of the various treatment groups were also evaluated, and animals treated with L6-F12578 and L6-F127 groups showed significant reduction (FIG. 6D). This weight reduction may be predominately contributed by decreased body fat content as seen on day 7 and 13 by DEXA analysis (FIG. 6E). The other significant changes observed in the treated animals were the significant increases in salivary gland weight in the groups of L6-F12578, L6-F127, L6-F4, and L6-F10 compared with Vehicle group on day 14, by 101% (P<0.001), 114% (P<0.001), 29% (p<0.01) and 22% (P<0.05) respectively (FIG. 6F), where the effects of L6-F12578 and L6-F127 being the most pronounced. We observed wet fur and fur color change (brown) during day 7-14 of the mice in the groups of L6-F12578, L6-F127. Significant increase in liver and intestine weights have also been observed in several treatment groups (FIG. 6G, 6H). The liver weight increased by 28% (P<0.001) in L6-F12578 group and by 48% (P<0.001) in L6-F4 group, and the small intestine weight increased by 21% (P<0.05), 31% (P<0.001), 30% (p<0.01) and 24% (P<0.05) in the group of L6-F12578, L6-F58, L6-F4, and L6-F49, respectively.

[0238] All of the above U.S. patents, U.S. patent application publications, U.S. patent applications, foreign patents, foreign patent applications and non-patent publications referred to in this specification and/or listed in the Application Data Sheet, are incorporated herein by reference, in their entirety.

[0239] From the foregoing it will be appreciated that, although specific embodiments of the invention have been described herein for purposes of illustration, various modifications may be made without deviating from the spirit and scope of the invention, and the various embodiments described above can be combined to provide further embodiments. Accordingly, the invention is not limited except as by the appended claims. Aspects of the embodiments can be modified, if necessary to employ concepts of the various patents, applications and publications disclosed herein to provide yet further embodiments. These and other changes can be made to the embodiments in light of the above-detailed description. In general, in the following claims, the terms used should not be construed to limit the claims to the specific embodiments disclosed in the specification and the claims, but should be construed to include all possible embodiments along with the full scope of equivalents to which such claims are entitled. Accordingly, the claims are not limited by the disclosure.

### REFERENCES

[0240] Chen, H., Lu, C., Ouyang, B., Zhang, H., Huang, Z., Bhatia, D., Lee, S. J., Shah, D., Sura, A., Yeh, W. C., et al. (2020). Development of Potent, Selective Surrogate WNT Molecules and Their Application in Defining Frizzled Requirements. Cell Chem Biol 27, 598-609 e594.
[0241] Gurney, A., Axelrod, F., Bond, C. J., Cain, J., Chartier, C., Donigan, L., Fischer, M., Chaudhari, A., Ji, M., Kapoun, A. M., et al. (2012). Wnt pathway inhibition via the targeting of Frizzled receptors results in decreased growth and tumorigenicity of human tumors. Proc Natl Acad Sci USA 109, 11717-11722.
[0242] Hao, H. X., Xie, Y., Zhang, Y., Charlat, O., Oster, E., Avello, M., Lei, H., Mickanin, C., Liu, D., Ruffner, H., et al. (2012). ZNRF3 promotes Wnt receptor turnover in an R-spondin-sensitive manner. Nature 485, 195-200.
[0243] Hu, H., Gehart, H., Artegiani, B., C, L. O.-I., Dekkers, F., Basak, O., van Es, J., Chuva de Sousa Lopes, S. M., Begthel, H., Korving, J., et al. (2018). Long-Term Expansion of Functional Mouse and Human Hepatocytes as 3D Organoids. Cell 175, 1591-1606 e1519.
[0244] Janda, C. Y., Dang, L. T., You, C., Chang, J., de Lau, W., Zhong, Z. A., Yan, K. S., Marecic, O., Siepe, D., Li, X., et al. (2017). Surrogate Wnt agonists that phenocopy canonical Wnt and beta-catenin signalling. Nature 545, 234-237.
[0245] Koo, B. K., Spit, M., Jordens, I., Low, T. Y., Stange, D. E., van de Wetering, M., van Es, J. H., Mohammed, S., Heck, A. J., Maurice, M. M., et al. (2012). Tumour suppressor RNF43 is a stem-cell E3 ligase that induces endocytosis of Wnt receptors. Nature 488, 665-669.
[0246] Sato, T., Stange, D. E., Ferrante, M., Vries, R. G., Van Es, J. H., Van den Brink, S., Van Houdt, W. J., Pronk, A., Van Gorp, J., Siersema, P. D., et al. (2011). Long-term expansion of epithelial organoids from human colon, adenoma, adenocarcinoma, and Barrett's epithelium. Gastroenterology 141, 1762-1772.
[0247] Sato, T., Vries, R. G., Snippert, H. J., van de Wetering, M., Barker, N., Stange, D. E., van Es, J. H., Abo, A., Kujala, P., Peters, P. J., et al. (2009). Single Lgr5 stem cells build crypt-villus structures in vitro without a mesenchymal niche. Nature 459, 262-265.
[0248] Schutgens, F., Rookmaaker, M. B., Margaritis, T., Rios, A., Ammerlaan, C., Jansen, J., Gijzen, L., Vormann, M., Vonk, A., Viveen, M., et al. (2019). Tubuloids derived from human adult kidney and urine for personalized disease modeling. Nat Biotechnol 37, 303-313.
[0249] Xie, Y., Zamponi, R., Charlat, O., Ramones, M., Swalley, S., Jiang, X., Rivera, D., Tschantz, W., Lu, B., Quinn, L., et al. (2013). Interaction with both ZNRF3 and LGR4 is required for the signalling activity of R-spondin. EMBO Rep 14, 1120-1126.

The application's sequence listing, which the Patent Office published only in electronic form, follows.

SEQUENCE LISTING (288 sequences)

SEQ ID NO: 1 - protein, 4 aa, Artificial Sequence
  Peptidyl linker
GGGG

SEQ ID NO: 2 - protein, 5 aa, Artificial Sequence
  Peptidyl linker
GGGGG

SEQ ID NO: 3 - protein, 6 aa, Artificial Sequence
  Peptidyl linker
GGGGGG

SEQ ID NO: 4 - protein, 7 aa, Artificial Sequence
  Peptidyl linker
GGGGGGG

SEQ ID NO: 5 - protein, 8 aa, Artificial Sequence
  Peptidyl linker
GGGGGGGG

SEQ ID NO: 6 - protein, 5 aa, Artificial Sequence
  Peptidyl linker
GGGGS

SEQ ID NO: 7 - protein, 4 aa, Artificial Sequence
  Peptidyl linker
GAGA

SEQ ID NO: 8 - protein, 6 aa, Artificial Sequence
  Peptidyl linker
GAGAGA

SEQ ID NO: 9 - protein, 8 aa, Artificial Sequence
  Peptidyl linker
GAGAGAGA

SEQ ID NO: 10 - protein, 4 aa, Artificial Sequence
  Peptidyl linker
AAAA

SEQ ID NO: 11 - protein, 5 aa, Artificial Sequence
  Peptidyl linker
AAAAA

SEQ ID NO: 12 - protein, 6 aa, Artificial Sequence
  Peptidyl linker
AAAAAA

SEQ ID NO: 13 - protein, 7 aa, Artificial Sequence
  Peptidyl linker
AAAAAAA

SEQ ID NO: 14 - protein, 8 aa, Artificial Sequence
  Peptidyl linker
AAAAAAAA

SEQ ID NO: 15 - protein, 6 aa, Artificial Sequence
  Peptidyl linker
GGGGGK

SEQ ID NO: 16 - protein, 7 aa, Artificial Sequence
  Peptidyl linker
GGGGGKR

SEQ ID NO: 17 - protein, 8 aa, Artificial Sequence
  Peptidyl linker
GGGKGGGG

SEQ ID NO: 18 - protein, 735 aa, Artificial Sequence
  Made in Lab - WNT surrogate molecule
EVQLVESGGGLVQPGGSLRLSCAASGFTFTSYYISWVRQAPGKGLEWVAEISPYSGSTYYADSVKGRFTISADTSKNTAYLQMNSLRAEDTAVYYCALRARPPIRLHPRGSVMDYWGQGTLVTVSSGSAASGSSGGSSSGADIQMTQSPSSLSASVGDRVTITCRASQDVSTAVAWYQQKPGKAPKLLIYSASFLYSGVPSRFSGSGSGTDFTLTISSLQPEDFATYYCQQSYTTPPTFGQGTKVEIKGSGSGGSGSGGSSGGEVQLVESGGGLVQPGGSLRLSCAASGFTFSHYTLSWVRQAPGKGLEWVSVISGDGSYTYYADSVKGRFTISSDNSKNTLYLQMNSLRAEDTAVYYCARNFIKYVFANWGQGTLVTVSSGGGGSGGGGSGGGGSDIELTQPPSVSVAPGQTARISCSGDNIGSFYVHWYQQKPGQAPVLVIYDKSNRPSGIPERFSGSNSGNTATLTISGTQAEDEADYYCQSYANTLSLVFGGGTKLTVLGSGSGDKTHTCPPCPAPEAAGGPSVFLFPPKPKDTLMISRTPEVTCVVVDVSHEDPEVKFNWYVDGVEVHNAKTKPREEQYNSTYRVVSVLTVLHQDWLNGKEYKCKVSNKALGAPIEKTISKAKGQPREPQVYTLPPSREEMTKNQVSLTCLVKGFYPSDIAVEWESNGQPENNYKTTPPVLDSDGSFFLYSKLTVDKSRWQQGNVFSCSVMHEALHNHYTQKSLSLSPGK

SEQ ID NO: 19 - protein, 589 aa, Artificial Sequence
  Made in Lab - WNT surrogate molecule
EVQLVESGGGLVQPGGSLRLSCAASGFTFTSYYISWVRQAPGKGLEWVAEISPYSGSTYYADSVKGRFTISADTSKNTAYLQMNSLRAEDTAVYYCALRARPPIRLHPRGSVMDYWGQGTLVTVSSGGGGSGGGGSGGGGSEVQLVESGGGLVQPGGSLRLSCAASGFTFSHYTLSWVRQAPGKGLEWVSVISGDGSYTYYADSVKGRFTISSDNSKNTLYLQMNSLRAEDTAVYYCARNFIKYVFANWGQGTLVTVSSASTKGPSVFPLAPSSKSTSGGTAALGCLVKDYFPEPVTVSWNSGALTSGVHTFPAVLQSSGLYSLSSVVTVPSSSLGTQTYICNVNHKPSNTKVDKKVEPKSCDKTHTCPPCPAPEAAGGPSVFLFPPKPKDTLMISRTPEVTCVVVDVSHEDPEVKFNWYVDGVEVHNAKTKPREEQYNSTYRVVSVLTVLHQDWLNGKEYKCKVSNKALGAPIEKTISKAKGQPREPQVYTLPPSREEMTKNQVSLTCLVKGFYPSDIAVEWESNGQPENNYKTTPPVLDSDGSFFLYSKLTVDKSRWQQGNVFSCSVMHEALHNHYTQKSLSLSPGK

SEQ ID NO: 20 - protein, 335 aa, Artificial Sequence
  Made in Lab - WNT surrogate molecule
DIQMTQSPSSLSASVGDRVTITCRASQDVSTAVAWYQQKPGKAPKLLIYSASFLYSGVPSRFSGSGSGTDFTLTISSLQPEDFATYYCQQSYTTPPTFGQGTKVEIKGGGGSGGGGSGGGGSDIELTQPPSVSVAPGQTARISCSGDNIGSFYVHWYQQKPGQAPVLVIYDKSNRPSGIPERFSGSNSGNTATLTISGTQAEDEADYYCQSYANTLSLVFGGGTKLTVLGQPKAAPSVTLFPPSSEELQANKATLVCLISDFYPGAVTVAWKADSSPVKAGVETTTPSKQSNNKYAASSYLSLTPEQWKSHRSYSCQVTHEGSTVEKTVAPTECS

SEQ ID NO: 21 - protein, 677 aa, Artificial Sequence
  Made in Lab - WNT surrogate molecule
DIQMTQSPSSLSASVGDRVTITCRASQDVSTAVAWYQQKPGKAPKLLIYSASFLYSGVPSRFSGSGSGTDFTLTISSLQPEDFATYYCQQSYTTPPTFGQGTKVEIKRTVAAPSVFIFPPSDEQLKSGTASVVCLLNNFYPREAKVQWKVDNALQSGNSQESVTEQDSKDSTYSLSSTLTLSKADYEKHKVYACEVTHQGLSSPVTKSFNRGECGGGGSGGGGSGGGGSEVQLVESGGGLVQPGGSLRLSCAASGFTFSHYTLSWVRQAPGKGLEWVSVISGDGSYTYYADSVKGRFTISSDNSKNTLYLQMNSLRAEDTAVYYCARNFIKYVFANWGQGTLVTVSSASTKGPSVFPLAPSSKSTSGGTAALGCLVKDYFPEPVTVSWNSGALTSGVHTFPAVLQSSGLYSLSSVVTVPSSSLGTQTYICNVNHKPSNTKVDKKVEPKSCDKTHTCPPCPAPEAAGGPSVFLFPPKPKDTLMISRTPEVTCVVVDVSHEDPEVKFNWYVDGVEVHNAKTKPREEQYNSTYRVVSVLTVLHQDWLNGKEYKCKVSNKALGAPIEKTISKAKGQPREPQVYTLPPSREEMTKNQVSLTCLVKGFYPSDIAVEWESNGQPENNYKTTPPVLDSDGSFFLYSKLTVDKSRWQQGNVFSCSVMHEALHNHYTQKSLSLSPGK

SEQ ID NO: 22 - protein, 213 aa, Artificial Sequence
  Made in Lab - WNT surrogate molecule
DIELTQPPSVSVAPGQTARISCSGDNIGSFYVHWYQQKPGQAPVLVIYDKSNRPSGIPERFSGSNSGNTATLTISGTQAEDEADYYCQSYANTLSLVFGGGTKLTVLGQPKAAPSVTLFPPSSEELQANKATLVCLISDFYPGAVTVAWKADSSPVKAGVETTTPSKQSNNKYAASSYLSLTPEQWKSHRSYSCQVTHEGSTVEKTVAPTECS

SEQ ID NO: 23 - protein, 229 aa, Artificial Sequence
  Made in Lab - WNT surrogate molecule
EVQLVESGGGLVQPGGSLRLSCAASGFTFTSYYISWVRQAPGKGLEWVAEISPYSGSTYYADSVKGRFTISADTSKNTAYLQMNSLRAEDTAVYYCALRARPPIRLHPRGSVMDYWGQGTLVTVSSASTKGPSVFPLAPSSKSTSGGTAALGCLVKDYFPEPVTVSWNSGALTSGVHTFPAVLQSSGLYSLSSVVTVPSSSLGTQTYICNVNHKPSNTKVDKKVEPKSC

SEQ ID NO: 24 - protein, 588 aa, Artificial Sequence
  Made in Lab - WNT surrogate molecule
EVQLVESGGGLVQPGGSLRLSCAASGFTFTSYYISWVRQAPGKGLEWVAEISPYSGSTYYADSVKGRFTISADTSKNTAYLQMNSLRAEDTAVYYCALRARPPIRLHPRGSVMDYWGQGTLVTVSSGGGGSGGGGSGGGGSEVQLVESGGGLVQPGGSLRLSCAASGFNISSSYIHWVRQAPGKGLEWVAYIYSSYGSTYYADSVKGRFTISADTSKNTAYLQMNSLRAEDTAVYYCARASWYALDYWGQGTLVTVSSASTKGPSVFPLAPSSKSTSGGTAALGCLVKDYFPEPVTVSWNSGALTSGVHTFPAVLQSSGLYSLSSVVTVPSSSLGTQTYICNVNHKPSNTKVDKKVEPKSCDKTHTCPPCPAPEAAGGPSVFLFPPKPKDTLMISRTPEVTCVVVDVSHEDPEVKFNWYVDGVEVHNAKTKPREEQYNSTYRVVSVLTVLHQDWLNGKEYKCKVSNKALGAPIEKTISKAKGQPREPQVYTLPPSREEMTKNQVSLTCLVKGFYPSDIAVEWESNGQPENNYKTTPPVLDSDGSFFLYSKLTVDKSRWQQGNVFSCSVMHEALHNHYTQKSLSLSPGK

SEQ ID NO: 25 - protein, 338 aa, Artificial Sequence
  Made in Lab - WNT surrogate molecule
DIQMTQSPSSLSASVGDRVTITCRASQDVSTAVAWYQQKPGKAPKLLIYSASFLYSGVPSRFSGSGSGTDFTLTISSLQPEDFATYYCQQSYTTPPTFGQGTKVEIKGGGGSGGGGSGGGGSDIQMTQSPSSLSASVGDRVTITCRASQSVSSAVAWYQQKPGKAPKLLIYSASSLYSGVPSRFSGSRSGTDFTLTISSLQPEDFATYYCQQYWYGVAPITFGQGTKVEIKRTVAAPSVFIFPPSDEQLKSGTASVVCLLNNFYPREAKVQWKVDNALQSGNSQESVTEQDSKDSTYSLSSTLTLSKADYEKHKVYACEVTHQGLSSPVTKSFNRGEC

SEQ ID NO: 26 - protein, 585 aa, Artificial Sequence
  Made in Lab - WNT surrogate molecule
EVQLVESGGGLVQPGGSLRLSCAASGFTFTSYYISWVRQAPGKGLEWVAEISPYSGSTYYADSVKGRFTISADTSKNTAYLQMNSLRAEDTAVYYCALRARPPIRLHPRGSVMDYWGQGTLVTVSSGGGGSGGGGSGGGGSEVQLVESGGGLVQPGGSLRLSCAASGFNISYSYIHWVRQAPGKGLEWVASIYSSSGSTSYADSVKGRFTISADTSKNTAYLQMNSLRAEDTAVYYCARGAIDYWGQGTLVTVSSASTKGPSVFPLAPSSKSTSGGTAALGCLVKDYFPEPVTVSWNSGALTSGVHTFPAVLQSSGLYSLSSVVTVPSSSLGTQTYICNVNHKPSNTKVDKKVEPKSCDKTHTCPPCPAPEAAGGPSVFLFPPKPKDTLMISRTPEVTCVVVDVSHEDPEVKFNWYVDGVEVHNAKTKPREEQYNSTYRVVSVLTVLHQDWLNGKEYKCKVSNKALGAPIEKTISKAKGQPREPQVYTLPPSREEMTKNQVSLTCLVKGFYPSDIAVEWESNGQPENNYKTTPPVLDSDGSFFLYSKLTVDKSRWQQGNVFSCSVMHEALHNHYTQKSLSLSPGK

SEQ ID NO: 27 - protein, 339 aa, Artificial Sequence
  Made in Lab - WNT surrogate molecule
DIQMTQSPSSLSASVGDRVTITCRASQDVSTAVAWYQQKPGKAPKLLIYSASFLYSGVPSRFSGSGSGTDFTLTISSLQPEDFATYYCQQSYTTPPTFGQGTKVEIKGGGGSGGGGSGGGGSDIQMTQSPSSLSASVGDRVTITCRASQSVSSAVAWYQQKPGKAPKLLIYSASSLYSGVPSRFSGSRSGTDFTLTISSLQPEDFATYYCQQWYSSGHVLITFGQGTKVEIKRTVAAPSVFIFPPSDEQLKSGTASVVCLLNNFYPREAKVQWKVDNALQSGNSQESVTEQDSKDSTYSLSSTLTLSKADYEKHKVYACEVTHQGLSSPVTKSFNRGEC

SEQ ID NO: 28 - protein, 589 aa, Artificial Sequence
  Made in Lab - WNT surrogate molecule
EVQLVESGGGLVQPGGSLRLSCAASGFTFTSYYISWVRQAPGKGLEWVAEISPYSGSTYYADSVKGRFTISADTSKNTAYLQMNSLRAEDTAVYYCALRARPPIRLHPRGSVMDYWGQGTLVTVSSGGGGSGGGGSGGGGSEVQLVESGGGLVQPGGSLRLSCAASGFNISYYYIHWVRQAPGKGLEWVASIYPSSGYTYYADSVKGRFTISADTSKNTAYLQMNSLRAEDTAVYYCARSSFYWAMDYWGQGTLVTVSSASTKGPSVFPLAPSSKSTSGGTAALGCLVKDYFPEPVTVSWNSGALTSGVHTFPAVLQSSGLYSLSSVVTVPSSSLGTQTYICNVNHKPSNTKVDKKVEPKSCDKTHTCPPCPAPEAAGGPSVFLFPPKPKDTLMISRTPEVTCVVVDVSHEDPEVKFNWYVDGVEVHNAKTKPREEQYNSTYRVVSVLTVLHQDWLNGKEYKCKVSNKALGAPIEKTISKAKGQPREPQVYTLPPSREEMTKNQVSLTCLVKGFYPSDIAVEWESNGQPENNYKTTPPVLDSDGSFFLYSKLTVDKSRWQQGNVFSCSVMHEALHNHYTQKSLSLSPGK

SEQ ID NO: 29 - protein, 337 aa, Artificial Sequence
  Made in Lab - WNT surrogate molecule
DIQMTQSPSSLSASVGDRVTITCRASQDVSTAVAWYQQKPGKAPKLLIYSASFLYSGVPSRFSGSGSGTDFTLTISSLQPEDFATYYCQQSYTTPPTFGQGTKVEIKGGGGSGGGGSGGGGSDIQMTQSPSSLSASVGDRVTITCRASQSVSSAVAWYQQKPGKAPKLLIYSASSLYSGVPSRFSGSRSGTDFTLTISSLQPEDFATYYCQQSYAAYLFTFGQGTKVEIKRTVAAPSVFIFPPSDEQLKSGTASVVCLLNNFYPREAKVQWKVDNALQSGNSQESVTEQDSKDSTYSLSSTLTLSKADYEKHKVYACEVTHQGLSSPVTKSFNRGEC

SEQ ID NO: 30 - protein, 597 aa, Artificial Sequence
  Made in Lab - WNT surrogate molecule
EVQLVESGGGLVQPGGSLRLSCAASGFTFTSYYISWVRQAPGKGLEWVAEISPYSGSTYYADSVKGRFTISADTSKNTAYLQMNSLRAEDTAVYYCALRARPPIRLHPRGSVMDYWGQGTLVTVSSGGGGSGGGGSGGGGSEVQLVESGGGLVQPGGSLRLSCAASGFTFSSFNMFWVRQAPGKGLEWVAGIDDDGSYPNYGSAVKGRATISRDNSKNTLYLQMNSLRAEDTAVYYCAKSGYGGSWGGYIADDIDAWGQGTLVTVSSASTKGPSVFPLAPSSKSTSGGTAALGCLVKDYFPEPVTVSWNSGALTSGVHTFPAVLQSSGLYSLSSVVTVPSSSLGTQTYICNVNHKPSNTKVDKKVEPKSCDKTHTCPPCPAPEAAGGPSVFLFPPKPKDTLMISRTPEVTCVVVDVSHEDPEVKFNWYVDGVEVHNAKTKPREEQYNSTYRVVSVLTVLHQDWLNGKEYKCKVSNKALGAPIEKTISKAKGQPREPQVYTLPPSREEMTKNQVSLTCLVKGFYPSDIAVEWESNGQPENNYKTTPPVLDSDGSFFLYSKLTVDKSRWQQGNVFSCSVMHEALHNHYTQKSLSLSPGK

SEQ ID NO: 31 - protein, 335 aa, Artificial Sequence
  Made in Lab - WNT surrogate molecule
DIQMTQSPSSLSASVGDRVTITCRASQDVSTAVAWYQQKPGKAPKLLIYSASFLYSGVPSRFSGSGSGTDFTLTISSLQPEDFATYYCQQSYTTPPTFGQGTKVEIKGGGGSGGGGSGGGGSELTQPPSVSVSPGQTARITCSGDGSYAGSYYYGWYQQKPGQAPVTLIYYNNKRPSGIPERFSGSLSGSTNTLTISGVQAEDEADYYCGSADNSGAAFGGGTKLTVLRTVAAPSVFIFPPSDEQLKSGTASVVCLLNNFYPREAKVQWKVDNALQSGNSQESVTEQDSKDSTYSLSSTLTLSKADYEKHKVYACEVTHQGLSSPVTKSFNRGEC

SEQ ID NO: 32 - protein, 349 aa, Artificial Sequence
  Made in Lab - RSPO mimetic molecule
DKTHTCPPCPAPEAAGGPSVFLFPPKPKDTLMISRTPEVTCVVVDVSHEDPEVKFNWYVDGVEVHNAKTKPREEQYNSTYRVVSVLTVLHQDWLNGKEYKCKVSNKALGAPIEKTISKAKGQPREPQVYTLPPSREEMTKNQVSLTCLVKGFYPSDIAVEWESNGQPENNYKTTPPVLDSDGSFFLYSKLTVDKSRWQQGNVFSCSVMHEALHNHYTQKSLSLSPGKGGGGSGGGGSGGGGSNPICKGCLSCSKDNGCSRCQQKLFFFLRREGMRQYGECLHSCPSGYYGHRAPDMNRCARCRIENCDSCFSKDFCTKCKVGFYLHRGRCFDECPDGFAPLEETMECVE

SEQ ID NO: 33 - skipped

SEQ ID NO: 34 - protein, 570 aa, Artificial Sequence
  Made in Lab - RSPO mimetic molecule
EVQLVESGGGLVQPGGSLRLSCAASGFTFSHYTLSWVRQAPGKGLEWVSVISGDGSYTYYADSVKGRFTISSDNSKNTLYLQMNSLRAEDTAVYYCARNFIKYVFANWGQGTLVTVSSASTKGPSVFPLAPSSKSTSGGTAALGCLVKDYFPEPVTVSWNSGALTSGVHTFPAVLQSSGLYSLSSVVTVPSSSLGTQTYICNVNHKPSNTKVDKKVEPKSCDKTHTCPPCPAPEAAGGPSVFLFPPKPKDTLMISRTPEVTCVVVDVSHEDPEVKFNWYVDGVEVHNAKTKPREEQYNSTYRVVSVLTVLHQDWLNGKEYKCKVSNKALGAPIEKTISKAKGQPREPQVYTLPPSREEMTKNQVSLTCLVKGFYPSDIAVEWESNGQPENNYKTTPPVLDSDGSFFLYSKLTVDKSRWQQGNVFSCSVMHEALHNHYTQKSLSLSPGKGGGGSGSGGSGGGGSNPICKGCLSCSKDNGCSRCQQKLFFFLRREGMRQYGECLHSCPSGYYGHRAPDMNRCARCRIENCDSCRSKDACTKCKVGFYLHRGRCFDECPDGFAPLEETMECVE

SEQ ID NO: 35 - protein, 214 aa, Artificial Sequence
  Made in Lab - RSPO mimetic molecule
DIELTQPPSVSVAPGQTARISCSGDNLGKKYVYWYQQKPGQAPVLVIYGDDERPSGIPERFSGSNSGNTATLTISGTQAEDEADYYCASYDSSHILIVFGGGTKLTVLGQPKAAPSVTLFPPSSEELQANKATLVCLISDFYPGAVTVAWKADSSPVKAGVETTTPSKQSNNKYAASSYLSLTPEQWKSHRSYSCQVTHEGSTVEKTVAPTECS

SEQ ID NO: 36 - protein, 569 aa, Artificial Sequence
  Made in Lab - RSPO mimetic molecule
QVQLVESGGGLVQPGGSLRLSCAASGFTFSRYGMHWVRQAPGKGLEWVSGISSIGSNTYYADSVKGRFTISRDNSKNTLYLQMNSLRAEDTAVYYCARWYKTYIDVWGQGTLVTVSSASTKGPSVFPLAPSSKSTSGGTAALGCLVKDYFPEPVTVSWNSGALTSGVHTFPAVLQSSGLYSLSSVVTVPSSSLGTQTYICNVNHKPSNTKVDKKVEPKSCDKTHTCPPCPAPEAAGGPSVFLFPPKPKDTLMISRTPEVTCVVVDVSHEDPEVKFNWYVDGVEVHNAKTKPREEQYNSTYRVVSVLTVLHQDWLNGKEYKCKVSNKALGAPIEKTISKAKGQPREPQVYTLPPSREEMTKNQVSLTCLVKGFYPSDIAVEWESNGQPENNYKTTPPVLDSDGSFFLYSKLTVDKSRWQQGNVFSCSVMHEALHNHYTQKSLSLSPGKGGGGSGSGGSGGGGSNPICKGCLSCSKDNGCSRCQQKLFFFLRREGMRQYGECLHSCPSGYYGHRAPDMNRCARCRIENCDSCRSKDACTKCKVGFYLHRGRCFDECPDGFAPLEETMECVE

SEQ ID NO: 37 - protein, 216 aa, Artificial Sequence
  Made in Lab - RSPO mimetic molecule
QAVVLQEPSLSVSPGGTVTLTCGLSSGSVSTNYYPSWYQQTPGQAPRTLIYYTNTRSSDVPERFSGSIVGNKAALTITGAQPDDESVYFCLLYLGRGIWVFGGGTKLTVLGQPKAAPSVTLFPPSSEELQANKATLVCLISDFYPGAVTVAWKADSSPVKAGVETTTPSKQSNNKYAASSYLSLTPEQWKSHRSYSCQVTHEGSTVEKTVAPTECS

SEQ ID NO: 38 - protein, 574 aa, Artificial Sequence
  Made in Lab - RSPO mimetic molecule
NPICKGCLSCSKDNGCSRCQQKLFFFLRREGMRQYGECLHSCPSGYYGHRAPDMNRCARCRIENCDSCRSKDACTKCKVGFYLHRGRCFDECPDGFAPLEETMECVEGGGGSGGGGSGGGGSEVQLVQSGAEVKKPGASVKVSCKASGYTFTSYGISWVRQAPGQGLEWMGWISAYNGNTNYAQKLQGRVTMTTDTSTSTAYMELRSLRSDDTAVYYCASSKEKATYYYGMDVWGQGTTVTVSSASTKGPSVFPLAPSSKSTSGGTAALGCLVKDYFPEPVTVSWNSGALTSGVHTFPAVLQSSGLYSLSSVVTVPSSSLGTQTYICNVNHKPSNTKVDKKVEPKSCDKTHTCPPCPAPEAAGGPSVFLFPPKPKDTLMISRTPEVTCVVVDVSHEDPEVKFNWYVDGVEVHNAKTKPREEQYNSTYRVVSVLTVLHQDWLNGKEYKCKVSNKALGAPIEKTISKAKGQPREPQVYTLPPSREEMTKNQVSLTCLVKGFYPSDIAVEWESNGQPENNYKTTPPVLDSDGSFFLYSKLTVDKSRWQQGNVFSCSVMHEALHNHYTQKSLSLSPGK

SEQ ID NO: 39 - protein, 213 aa, Artificial Sequence
  Made in Lab - RSPO mimetic molecule
DIVMTQSPKSMSMSVGERVTLRCKASENVLNYVSWYQQKPEQSPKLLIYGASNRYTGVPDRFTGSGSATDFTLTISSVQAEDLADYHCGQSYRYPTFGAGTKLELKRTVAAPSVFIFPPSDEQLKSGTASVVCLLNNFYPREAKVQWKVDNALQSGNSQESVTEQDSKDSTYSLSSTLTLSKADYEKHKVYACEVTHQGLSSPVTKSFNRGEC

SEQ ID NO: 40 - protein, 572 aa, Artificial Sequence
  Made in Lab - RSPO mimetic molecule
NPICKGCLSCSKDNGCSRCQQKLFFFLRREGMRQYGECLHSCPSGYYGHRAPDMNRCARCRIENCDSCRSKDACTKCKVGFYLHRGRCFDECPDGFAPLEETMECVEGGGGSGGGGSGGGGSEVQPVESGGGLVQPKGSLKLSCAASGFTFNTYAMHWVRQAPGKGLEWVARIRSKSNNYAKNYDDSVKDRFTISRDDSQSMLYLQMNNLKTEDTAMYYCVRENYGGRFDYWGQGTTLTVSSASTKGPSVFPLAPSSKSTSGGTAALGCLVKDYFPEPVTVSWNSGALTSGVHTFPAVLQSSGLYSLSSVVTVPSSSLGTQTYICNVNHKPSNTKVDKKVEPKSCDKTHTCPPCPAPEAAGGPSVFLFPPKPKDTLMISRTPEVTCVVVDVSHEDPEVKFNWYVDGVEVHNAKTKPREEQYNSTYRVVSVLTVLHQDWLNGKEYKCKVSNKALGAPIEKTISKAKGQPREPQVYTLPPSREEMTKNQVSLTCLVKGFYPSDIAVEWESNGQPENNYKTTPPVLDSDGSFFLYSKLTVDKSRWQQGNVFSCSVMHEALHNHYTQKSLSLSPGK

SEQ ID NO: 41 - protein, 565 aa, Artificial Sequence
  Made in Lab - RSPO mimetic molecule
NPICKGCLSCSKDNGCSRCQQKLFFFLRREGMRQYGECLHSCPSGYYGHRAPDMNRCARCRIENCDSCRSKDACTKCKVGFYLHRGRCFDECPDGFAPLEETMECVEGGGGSGGGGSGGGGSQVQLVESGGGLVQPGGSLRLSCAASGFTFSRYGMHWVRQAPGKGLEWVSGISSIGSNTYYADSVKGRFTISRDNSKNTLYLQMNSLRAEDTAVYYCARWYKTYIDVWGQGTLVTVSSASTKGPSVFPLAPCSRSTSESTAALGCLVKDYFPEPVTVSWNSGALTSGVHTFPAVLQSSGLYSLSSVVTVPSSNFGTQTYTCNVDHKPSNTKVDKTVERKCCVECPPCPAPPVAGPSVFLFPPKPKDTLMISRTPEVTCVVVDVSHEDPEVQFNWYVDGVEVHNAKTKPREEQFNSTFRVVSVLTVVHQDWLNGKEYKCKVSNKGLPAPIEKTISKTKGQPREPQVYTLPPSREEMTKNQVSLTCLVKGFYPSDIAVEWESNGQPENNYKTTPPMLDSDGSFFLYSKLTVDKSRWQQGNVFSCSVMHEALHNHYTQKSLSLSPGK

SEQ ID NO: 42 - protein, 358 aa, Artificial Sequence
  Made in Lab - RSPO mimetic molecule
NPICKGCLSCSKDNGCSRCQQKLFFFLRREGMRQYGECLHSCPSGYYGHRAPDMNRCARCRIENCDSCRSKDACTKCKVGFYLHRGRCFDECPDGFAPLEETMECVEGGGGSGGGGSGGGGSEVQLVQSGAEVKKPGASVKVSCKASGYTFTSYGISWVRQAPGQGLEWMGWISAYNGNTNYAQKLQGRVTMTTDTSTSTAYMELRSLRSDDTAVYYCASSKEKATYYYGMDVWGQGTTVTVSSASTKGPSVFPLAPSSKSTSGGTAALGCLVKDYFPEPVTVSWNSGALTSGVHTFPAVLQSSGLYSLSSVVTVPSSSLGTQTYICNVNHKPSNTKVDKKVEPKSCGSGSGHHHHHH

SEQ ID NO: 43 - protein, 340 aa, Artificial Sequence
  Made in Lab - RSPO mimetic molecule
DVQLVESGGGLVQAGGSLRLACAGSGRIFAIYDIAWYRHPPGNQRELVAMIRPVVTEIDYADSVKGRFTISRNNAMKTVYLQMNNLKPEDTAVYYCNAKRPWGSRDEYWGQGTQVTVSSGSGSGQAVVLQEPSLSVSPGGTVTLTCGLSSGSVSTNYYPSWYQQTPGQAPRTLIYYTNTRSSDVPERFSGSIVGNKAALTITGAQPDDESVYFCLLYLGRGIWVFGGGTKLTVLGQPKAAPSVTLFPPSSEELQANKATLVCLISDFYPGAVTVAWKADSSPVKAGVETTTPSKQSNNKYAASSYLSLTPEQWKSHRSYSCQVTHEGSTVEKTVAPTECS

SEQ ID NO: 44 - protein, 574 aa, Artificial Sequence
  Made in Lab - RSPO mimetic molecule
EVQLVQSGAEVKKPGASVKVSCKASGYTFTSYGISWVRQAPGQGLEWMGWISAYNGNTNYAQKLQGRVTMTTDTSTSTAYMELRSLRSDDTAVYYCASSKEKATYYYGMDVWGQGTTVTVSSASTKGPSVFPLAPSSKSTSGGTAALGCLVKDYFPEPVTVSWNSGALTSGVHTFPAVLQSSGLYSLSSVVTVPSSSLGTQTYICNVNHKPSNTKVDKKVEPKSCDKTHTCPPCPAPEAAGGPSVFLFPPKPKDTLMISRTPEVTCVVVDVSHEDPEVKFNWYVDGVEVHNAKTKPREEQYNSTYRVVSVLTVLHQDWLNGKEYKCKVSNKALGAPIEKTISKAKGQPREPQVYTLPPSREEMTKNQVSLTCLVKGFYPSDIAVEWESNGQPENNYKTTPPVLDSDGSFFLYSKLTVDKSRWQQGNVFSCSVMHEALHNHYTQKSLSLSPGKGGGGSGSGGSGGGGSNPICKGCLSCSKDNGCSRCQQKLFFFLRREGMRQYGECLHSCPSGYYGHRAPDMNRCARCRIENCDSCRSKDACTKCKVGFYLHRGRCFDECPDGFAPLEETMECVE

SEQ ID NO: 45 - protein, 462 aa, Artificial Sequence
  Made in Lab - RSPO mimetic molecule
DVQLVESGGGLVQAGGSLRLACAGSGRIFAIYDIAWYRHPPGNQRELVAMIRPVVTEIDYADSVKGRFTISRNNAMKTVYLQMNNLKPEDTAVYYCNAKRPWGSRDEYWGQGTQVTVSSGSGSGQAVVLQEPSLSVSPGGTVTLTCGLSSGSVSTNYYPSWYQQTPGQAPRTLIYYTNTRSSDVPERFSGSIVGNKAALTITGAQPDDESVYFCLLYLGRGIWVFGGGTKLTVLGQPKAAPSVTLFPPSSEELQANKATLVCLISDFYPGAVTVAWKADSSPVKAGVETTTPSKQSNNKYAASSYLSLTPEQWKSHRSYSCQVTHEGSTVEKTVAPTECSGGGGSGSGGSGGGGSNPICKGCLSCSKDNGCSRCQQKLFFFLRREGMRQYGECLHSCPSGYYGHRAPDMNRCARCRIENCDSCRSKDACTKCKVGFYLHRGRCFDECPDGFAPLEETMECVE

SEQ ID NO: 46 - protein, 452 aa, Artificial Sequence
  Made in Lab - RSPO mimetic molecule
EVQLVQSGAEVKKPGASVKVSCKASGYTFTSYGISWVRQAPGQGLEWMGWISAYNGNTNYAQKLQGRVTMTTDTSTSTAYMELRSLRSDDTAVYYCASSKEKATYYYGMDVWGQGTTVTVSSASTKGPSVFPLAPSSKSTSGGTAALGCLVKDYFPEPVTVSWNSGALTSGVHTFPAVLQSSGLYSLSSVVTVPSSSLGTQTYICNVNHKPSNTKVDKKVEPKSCDKTHTCPPCPAPEAAGGPSVFLFPPKPKDTLMISRTPEVTCVVVDVSHEDPEVKFNWYVDGVEVHNAKTKPREEQYNSTYRVVSVLTVLHQDWLNGKEYKCKVSNKALGAPIEKTISKAKGQPREPQVYTLPPSREEMTKNQVSLTCLVKGFYPSDIAVEWESNGQPENNYKTTPPVLDSDGSFFLYSKLTVDKSRWQQGNVFSCSVMHEALHNHYTQKSLSLSPGK

SEQ ID NO: 47 - protein, 338 aa, Artificial Sequence
  Made in Lab - RSPO mimetic molecule
QAVVLQEPSLSVSPGGTVTLTCGLSSGSVSTNYYPSWYQQTPGQAPRTLIYYTNTRSSDVPERFSGSIVGNKAALTITGAQPDDESVYFCLLYLGRGIWVFGGGTKLTVLGQPKAAPSVTLFPPSSEELQANKATLVCLISDFYPGAVTVAWKADSSPVKAGVETTTPSKQSNNKYAASSYLSLTPEQWKSHRSYSCQVTHEGSTVEKTVAPTECSGGGGSGSGGSGGGGSNPICKGCLSCSKDNGCSRCQQKLFFFLRREGMRQYGECLHSCPSGYYGHRAPDMNRCARCRIENCDSCRSKDACTKCKVGFYLHRGRCFDECPDGFAPLEETMECVE

SEQ ID NO: 48 - protein, 711 aa, Artificial Sequence
  Made in Lab - RSPO mimetic molecule
EVQLVESGGGLVQPGGSLRLSCAASGFTFTSYYISWVRQAPGKGLEWVAEISPYSGSTYYADSVKGRFTISADTSKNTAYLQMNSLRAEDTAVYYCALRARPPIRLHPRGSVMDYWGQGTLVTVSSGGGGSGGGGSGGGGSEVQLVESGGGLVQPGGSLRLSCAASGFTFSHYTLSWVRQAPGKGLEWVSVISGDGSYTYYADSVKGRFTISSDNSKNTLYLQMNSLRAEDTAVYYCARNFIKYVFANWGQGTLVTVSSASTKGPSVFPLAPSSKSTSGGTAALGCLVKDYFPEPVTVSWNSGALTSGVHTFPAVLQSSGLYSLSSVVTVPSSSLGTQTYICNVNHKPSNTKVDKKVEPKSCDKTHTCPPCPAPEAAGGPSVFLFPPKPKDTLMISRTPEVTCVVVDVSHEDPEVKFNWYVDGVEVHNAKTKPREEQYNSTYRVVSVLTVLHQDWLNGKEYKCKVSNKALGAPIEKTISKAKGQPREPQVYTLPPSREEMTKNQVSLTCLVKGFYPSDIAVEWESNGQPENNYKTTPPVLDSDGSFFLYSKLTVDKSRWQQGNVFSCSVMHEALHNHYTQKSLSLSPGKGGGGSGSGGSGGGGSNPICKGCLSCSKDNGCSRCQQKLFFFLRREGMRQYGECLHSCPSGYYGHRAPDMNRCARCRIENCDSCRSKDACTKCKVGFYLHRGRCFDECPDGFAPLEETMECVE

SEQ ID NO: 49 - protein, 216 aa, Artificial Sequence
  Made in Lab - RSPO mimetic molecule
DIQMTQSPSSLSASVGDRVTITCRASQSVSSAVAWYQQKPGKAPKLLIYSASSLYSGVPSRFSGSRSGTDFTLTISSLQPEDFATYYCQQYWYGVAPITFGQGTKVEIKRTVAAPSVFIFPPSDEQLKSGTASVVCLLNNFYPREAKVQWKVDNALQSGNSQESVTEQDSKDSTYSLSSTLTLSKADYEKHKVYACEVTHQGLSSPVTKSFNRGEC

SEQ ID NO: 50 - protein, 576 aa, Artificial Sequence
  Made in Lab - RSPO mimetic molecule
EVQLVESGGGLVQPGGSLRLSCAASGFNISSSYIHWVRQAPGKGLEWVAYIYSSYGSTYYADSVKGRFTISADTSKNTAYLQMNSLRAEDTAVYYCARASWYALDYWGQGTLVTVSSASTKGPSASTKGPSVFPLAPSSKSTSGGTAALGCLVKDYFPEPVTVSWNSGALTSGVHTFPAVLQSSGLYSLSSVVTVPSSSLGTQTYICNVNHKPSNTKVDKKVEPKSCDKTHTCPPCPAPEAAGGPSVFLFPPKPKDTLMISRTPEVTCVVVDVSHEDPEVKFNWYVDGVEVHNAKTKPREEQYNSTYRVVSVLTVLHQDWLNGKEYKCKVSNKALGAPIEKTISKAKGQPREPQVYTLPPSREEMTKNQVSLTCLVKGFYPSDIAVEWESNGQPENNYKTTPPVLDSDGSFFLYSKLTVDKSRWQQGNVFSCSVMHEALHNHYTQKSLSLSPGKGGGGSGSGGSGGGGSNPICKGCLSCSKDNGCSRCQQKLFFFLRREGMRQYGECLHSCPSGYYGHRAPDMNRCARCRIENCDSCRSKDACTKCKVGFYLHRGRCFDECPDGFAPLEETMECVE

SEQ ID NO: 51 - protein, 710 aa, Artificial Sequence
  Made in Lab - RSPO mimetic molecule
EVQLVESGGGLVQPGGSLRLSCAASGFTFTSYYISWVRQAPGKGLEWVAEISPYSGSTYYADSVKGRFTISADTSKNTAYLQMNSLRAEDTAVYYCALRARPPIRLHPRGSVMDYWGQGTLVTVSSGGGGSGGGGSGGGGSEVQLVESGGGLVQPGGSLRLSCAASGFNISSSYIHWVRQAPGKGLEWVAYIYSSYGSTYYADSVKGRFTISADTSKNTAYLQMNSLRAEDTAVYYCARASWYALDYWGQGTLVTVSSASTKGPSVFPLAPSSKSTSGGTAALGCLVKDYFPEPVTVSWNSGALTSGVHTFPAVLQSSGLYSLSSVVTVPSSSLGTQTYICNVNHKPSNTKVDKKVEPKSCDKTHTCPPCPAPEAAGGPSVFLFPPKPKDTLMISRTPEVTCVVVDVSHEDPEVKFNWYVDGVEVHNAKTKPREEQYNSTYRVVSVLTVLHQDWLNGKEYKCKVSNKALGAPIEKTISKAKGQPREPQVYTLPPSREEMTKNQVSLTCLVKGFYPSDIAVEWESNGQPENNYKTTPPVLDSDGSFFLYSKLTVDKSRWQQGNVFSCSVMHEALHNHYTQKSLSLSPGKGGGGSGSGGSGGGGSNPICKGCLSCSKDNGCSRCQQKLFFFLRREGMRQYGECLHSCPSGYYGHRAPDMNRCARCRIENCDSCRSKDACTKCKVGFYLHRGRCFDECPDGFAPLEETMECVE

SEQ ID NO: 52 - protein, 217 aa, Artificial Sequence
  Made in Lab - RSPO mimetic molecule
DIQMTQSPSSLSASVGDRVTITCRASQSVSSAVAWYQQKPGKAPKLLIYSASSLYSGVPSRFSGSRSGTDFTLTISSLQPEDFATYYCQQWYSSGHVLITFGQGTKVEIKRTVAAPSVFIFPPSDEQLKSGTASVVCLLNNFYPREAKVQWKVDNALQSGNSQESVTEQDSKDSTYSLSSTLTLSKADYEKHKVYACEVTHQGLSSPVTKSFNRGEC

SEQ ID NO: 53 - protein, 566 aa, Artificial Sequence
  Made in Lab - RSPO mimetic molecule
EVQLVESGGGLVQPGGSLRLSCAASGFNISYSYIHWVRQAPGKGLEWVASIYSSSGSTSYADSVKGRFTISADTSKNTAYLQMNSLRAEDTAVYYCARGAIDYWGQGTLVTVSSASTKGPSVFPLAPSSKSTSGGTAALGCLVKDYFPEPVTVSWNSGALTSGVHTFPAVLQSSGLYSLSSVVTVPSSSLGTQTYICNVNHKPSNTKVDKKVEPKSCDKTHTCPPCPAPEAAGGPSVFLFPPKPKDTLMISRTPEVTCVVVDVSHEDPEVKFNWYVDGVEVHNAKTKPREEQYNSTYRVVSVLTVLHQDWLNGKEYKCKVSNKALGAPIEKTISKAKGQPREPQVYTLPPSREEMTKNQVSLTCLVKGFYPSDIAVEWESNGQPENNYKTTPPVLDSDGSFFLYSKLTVDKSRWQQGNVFSCSVMHEALHNHYTQKSLSLSPGKGGGGSGSGGSGGGGSNPICKGCLSCSKDNGCSRCQQKLFFFLRREGMRQYGECLHSCPSGYYGHRAPDMNRCARCRIENCDSCRSKDACTKCKVGFYLHRGRCFDECPDGFAPLEETMECVE

SEQ ID NO: 54 - protein, 707 aa, Artificial Sequence
  Made in Lab - RSPO mimetic molecule
EVQLVESGGGLVQPGGSLRLSCAASGFTFTSYYISWVRQAPGKGLEWVAEISPYSGSTYYADSVKGRFTISADTSKNTAYLQMNSLRAEDTAVYYCALRARPPIRLHPRGSVMDYWGQGTLVTVSSGGGGSGGGGSGGGGSEVQLVESGGGLVQPGGSLRLSCAASGFNISYSYIHWVRQAPGKGLEWVASIYSSSGSTSYADSVKGRFTISADTSKNTAYLQMNSLRAEDTAVYYCARGAIDYWGQGTLVTVSSASTKGPSVFPLAPSSKSTSGGTAALGCLVKDYFPEPVTVSWNSGALTSGVHTFPAVLQSSGLYSLSSVVTVPSSSLGTQTYICNVNHKPSNTKVDKKVEPKSCDKTHTCPPCPAPEAAGGPSVFLFPPKPKDTLMISRTPEVTCVVVDVSHEDPEVKFNWYVDGVEVHNAKTKPREEQYNSTYRVVSVLTVLHQDWLNGKEYKCKVSNKALGAPIEKTISKAKGQPREPQVYTLPPSREEMTKNQVSLTCLVKGFYPSDIAVEWESNGQPENNYKTTPPVLDSDGSFFLYSKLTVDKSRWQQGNVFSCSVMHEALHNHYTQKSLSLSPGKGGGGSGSGGSGGGGSNPICKGCLSCSKDNGCSRCQQKLFFFLRREGMRQYGECLHSCPSGYYGHRAPDMNRCARCRIENCDSCRSKDACTKCKVGFYLHRGRCFDECPDGFAPLEETMECVE

SEQ ID NO: 55 - protein, 590 aa, Artificial Sequence
  Made in Lab - WNT surrogate molecule
EVQLVESGGGLVQPGGSLRLSCAASGFTFTSYYISWVRQAPGKGLEWVAEISPYSGSTYYADSVKGRFTISADTSKNTAYLQMNSLRAEDTAVYYCALRARPPIRLHPRGSVMDYWGQGTLVTVSSGGGGSGGGGSGGGGSEVQLVESGGGLVQPGGSLRLSCAASGFNLSSYSMHWVRQAPGKGLEWVAYISSYYGYTYYADSVKGRFTISADTSKNTAYLQMNSLRAEDTAVYYCARPAPGHWGFDYWGQGTLVTVSSASTKGPSVFPLAPSSKSTSGGTAALGCLVKDYFPEPVTVSWNSGALTSGVHTFPAVLQSSGLYSLSSVVTVPSSSLGTQTYICNVNHKPSNTKVDKKVEPKSCDKTHTCPPCPAPEAAGGPSVFLFPPKPKDTLMISRTPEVTCVVVDVSHEDPEVKFNWYVDGVEVHNAKTKPREEQYNSTYRVVSVLTVLHQDWLNGKEYKCKVSNKALGAPIEKTISKAKGQPREPQVYTLPPSREEMTKNQVSLTCLVKGFYPSDIAVEWESNGQPENNYKTTPPVLDSDGSFFLYSKLTVDKSRWQQGNVFSCSVMHEALHNHYTQKSLSLSPGK

SEQ ID NO: 56 - protein, 336 aa, Artificial Sequence
  Made in Lab - WNT surrogate molecule
DIQMTQSPSSLSASVGDRVTITCRASQDVSTAVAWYQQKPGKAPKLLIYSASFLYSGVPSRFSGSGSGTDFTLTISSLQPEDFATYYCQQSYTTPPTFGQGTKVEIKGGGGSGGGGSGGGGSDIQMTQSPSSLSASVGDRVTITCRASQSVSSAVAWYQQKPGKAPKLLIYSASSLYSGVPSRFSGSRSGTDFTLTISSLQPEDFATYYCQQWYYAPITFGQGTKVEIKRTVAAPSVFIFPPSDEQLKSGTASVVCLLNNFYPREAKVQWKVDNALQSGNSQESVTEQDSKDSTYSLSSTLTLSKADYEKHKVYACEVTHQGLSSPVTKSFNRGEC

SEQ ID NO: 57 - protein, 590 aa, Artificial Sequence
  Made in Lab - WNT surrogate molecule
EVQLVESGGGLVQPGGSLRLSCAASGFTFTSYYISWVRQAPGKGLEWVAEISPYSGSTYYADSVKGRFTISADTSKNTAYLQMNSLRAEDTAVYYCALRARPPIRLHPRGSVMDYWGQGTLVTVSSGGGGSGGGGSGGGGSEVQLVQSGAEVKKPGASVKVSCKASGGTFSSYAISWVRQAPGQGLEWMGWINAGNGNTTYAQKFQGRVTMTRDTSTSTVYMELSSLRSEDTAVYYCARHYYGSGSYPDWGQGTLVTVSSASTKGPSVFPLAPSSKSTSGGTAALGCLVKDYFPEPVTVSWNSGALTSGVHTFPAVLQSSGLYSLSSVVTVPSSSLGTQTYICNVNHKPSNTKVDKKVEPKSCDKTHTCPPCPAPEAAGGPSVFLFPPKPKDTLMISRTPEVTCVVVDVSHEDPEVKFNWYVDGVEVHNAKTKPREEQYNSTYRVVSVLTVLHQDWLNGKEYKCKVSNKALGAPIEKTISKAKGQPREPQVYTLPPSREEMTKNQVSLTCLVKGFYPSDIAVEWESNGQPENNYKTTPPVLDSDGSFFLYSKLTVDKSRWQQGNVFSCSVMHEALHNHYTQKSLSLSPGK

SEQ ID NO: 58 - protein, 337 aa, Artificial Sequence
  Made in Lab - WNT surrogate molecule
DIQMTQSPSSLSASVGDRVTITCRASQDVSTAVAWYQQKPGKAPKLLIYSASFLYSGVPSRFSGSGSGTDFTLTISSLQPEDFATYYCQQSYTTPPTFGQGTKVEIKRGGGGSGGGGSGGGGSDIQMTQSPSSPSASVGDRVTITCRASQSISSYLNWYQQKPGKAPKLLIYAASSLQSGVPSRFSGSGSGTDFTLTISSLQPEDFATYYCQQSYSTPLTFGGGTKVEIKRTVAAPSVFIFPPSDEQLKSGTASVVCLLNNFYPREAKVQWKVDNALQSGNSQESVTEQDSKDSTYSLSSTLTLSKADYEKHKVYACEVTHQGLSSPVTKSFNRGEC

SEQ ID NO: 59 - protein, 591 aa, Artificial Sequence
  Made in Lab - WNT surrogate molecule
EVQLVESGGGLVQPGGSLRLSCAASGFTFTSYYISWVRQAPGKGLEWVAEISPYSGSTYYADSVKGRFTISADTSKNTAYLQMNSLRAEDTAVYYCALRARPPIRLHPRGSVMDYWGQGTLVTVSSGGGGSGGGGSGGGGSEVQLVESGGGLVQPGGSLRLSCAASGFNFSSSSIHWVRQAPGKGLEWVAYIYPSYDYTYYADSVKGRFTISADTSKNTAYLQMNSLRAEDTAVYYCARGYFYTWGGMDYWGQGTLVTVSSASTKGPSVFPLAPSSKSTSGGTAALGCLVKDYFPEPVTVSWNSGALTSGVHTFPAVLQSSGLYSLSSVVTVPSSSLGTQTYICNVNHKPSNTKVDKKVEPKSCDKTHTCPPCPAPEAAGGPSVFLFPPKPKDTLMISRTPEVTCVVVDVSHEDPEVKFNWYVDGVEVHNAKTKPREEQYNSTYRVVSVLTVLHQDWLNGKEYKCKVSNKALGAPIEKTISKAKGQPREPQVYTLPPSREEMTKNQVSLTCLVKGFYPSDIAVEWESNGQPENNYKTTPPVLDSDGSFFLYSKLTVDKSRWQQGNVFSCSVMHEALHNHYTQKSLSLSPGK

SEQ ID NO: 60 - protein, 336 aa, Artificial Sequence
  Made in Lab - WNT surrogate molecule
DIQMTQSPSSLSASVGDRVTITCRASQDVSTAVAWYQQKPGKAPKLLIYSASFLYSGVPSRFSGSGSGTDFTLTISSLQPEDFATYYCQQSYTTPPTFGQGTKVEIKRGGGGSGGGGSGGGGSDIQMTQSPSSLSASVGDRVTITCRASQSVSSAVAWYQQKPGKAPKLLIYSASSLYSGVPSRFSGSRSGTDFTLTISSLQPEDFATYYCQQYYSLFTFGQGTKVEIKRTVAAPSVFIFPPSDEQLKSGTASVVCLLNNFYPREAKVQWKVDNALQSGNSQESVTEQDSKDSTYSLSSTLTLSKADYEKHKVYACEVTHQGLSSPVTKSFNRGEC

SEQ ID NO: 61 - protein, 591 aa, Artificial Sequence
  Made in Lab - WNT surrogate molecule
EVQLVESGGGLVQPGGSLRLSCAASGFTFTSYYISWVRQAPGKGLEWVAEISPYSGSTYYADSVKGRFTISADTSKNTAYLQMNSLRAEDTAVYYCALRARPPIRLHPRGSVMDYWGQGTLVTVSSGGGGSGGGGSGGGGSEVQLVESGGGLVQPGGSLRLSCAASGFNIHSSSIHWVRQAPGKGLEWVAATYSSFGSITYADSVKGRFTISADTSKNTAYLQMNSLRAEDTAVYYCARYHHPFGYALDYWGQGTLVTVSSASTKGPSVFPLAPSSKSTSGGTAALGCLVKDYFPEPVTVSWNSGALTSGVHTFPAVLQSSGLYSLSSVVTVPSSSLGTQTYICNVNHKPSNTKVDKKVEPKSCDKTHTCPPCPAPEAAGGPSVFLFPPKPKDTLMISRTPEVTCVVVDVSHEDPEVKFNWYVDGVEVHNAKTKPREEQYNSTYRVVSVLTVLHQDWLNGKEYKCKVSNKALGAPIEKTISKAKGQPREPQVYTLPPSREEMTKNQVSLTCLVKGFYPSDIAVEWESNGQPENNYKTTPPVLDSDGSFFLYSKLTVDKSRWQQGNVFSCSVMHEALHNHYTQKSLSLSPGK

SEQ ID NO: 62 - protein, 336 aa, Artificial Sequence
  Made in Lab - WNT surrogate molecule
DIQMTQSPSSLSASVGDRVTITCRASQDVSTAVAWYQQKPGKAPKLLIYSASFLYSGVPSRFSGSGSGTDFTLTISSLQPEDFATYYCQQSYTTPPTFGQGTKVEIKRGGGGSGGGGSGGGGSDIQMTQSPSSLSASVGDRVTITCRASQSVSSAVAWYQQKPGKAPKLLIYSASSLYSGVPSRFSGSRSGTDFTLTISSLQPEDFATYYCQQGVYLFTFGQGTKVEIKRTVAAPSVFIFPPSDEQLKSGTASVVCLLNNFYPREAKVQWKVDNALQSGNSQESVTEQDSKDSTYSLSSTLTLSKADYEKHKVYACEVTHQGLSSPVTKSFNRGEC

SEQ ID NO: 63 - protein, 711 aa, Artificial Sequence
  Made in Lab - WNT surrogate molecule
EVQLVESGGGLVQPGGSLRLSCAASGFTFTSYYISWVRQAPGKGLEWVAEISPYSGSTYYADSVKGRFTISADTSKNTAYLQMNSLRAEDTAVYYCALRARPPIRLHPRGSVMDYWGQGTLVTVSSGSAASGSSGGSSSGADIQMTQSPSSLSASVGDRVTITCRASQDVSTAVAWYQQKPGKAPKLLIYSASFLYSGVPSRFSGSGSGTDFTLTISSLQPEDFATYYCQQSYTTPPTFGQGTKVEIKGGGGSGGGGSGGGGSEVQLVESGGGLVQPGGSLRLSCAASGFTFSHYTLSWVRQAPGKGLEWVSVISGDGSYTYYADSVKGRFTISSDNSKNTLYLQMNSLRAEDTAVYYCARNFIKYVFANWGQGTLVTVSSASTKGPSVFPLAPSSKSTSGGTAALGCLVKDYFPEPVTVSWNSGALTSGVHTFPAVLQSSGLYSLSSVVTVPSSSLGTQTYICNVNHKPSNTKVDKKVEPKSCDKTHTCPPCPAPEAAGGPSVFLFPPKPKDTLMISRTPEVTCVVVDVSHEDPEVKFNWYVDGVEVHNAKTKPREEQYNSTYRVVSVLTVLHQDWLNGKEYKCKVSNKALGAPIEKTISKAKGQPREPQVYTLPPSREEMTKNQVSLTCLVKGFYPSDIAVEWESNGQPENNYKTTPPVLDSDGSFFLYSKLTVDKSRWQQGNVFSCSVMHEALHNHYTQKSLSLSPGK

SEQ ID NO: 64 - protein, 213 aa, Artificial Sequence; identical to SEQ ID NO: 22
  Made in Lab - WNT surrogate molecule

SEQ ID NO: 65 - protein, 710 aa, Artificial Sequence
  Made in Lab - WNT surrogate molecule
EVQLVESGGGLVQPGGSLRLSCAASGFTFTSYYISWVRQAPGKGLEWVAEISPYSGSTYYADSVKGRFTISADTSKNTAYLQMNSLRAEDTAVYYCALRARPPIRLHPRGSVMDYWGQGTLVTVSSGSAASGSSGGSSSGADIQMTQSPSSLSASVGDRVTITCRASQDVSTAVAWYQQKPGKAPKLLIYSASFLYSGVPSRFSGSGSGTDFTLTISSLQPEDFATYYCQQSYTTPPTFGQGTKVEIKGGGGSGGGGSGGGGSEVQLVESGGGLVQPGGSLRLSCAASGFNISSSYIHWVRQAPGKGLEWVAYIYSSYGSTYYADSVKGRFTISADTSKNTAYLQMNSLRAEDTAVYYCARASWYALDYWGQGTLVTVSSASTKGPSVFPLAPSSKSTSGGTAALGCLVKDYFPEPVTVSWNSGALTSGVHTFPAVLQSSGLYSLSSVVTVPSSSLGTQTYICNVNHKPSNTKVDKKVEPKSCDKTHTCPPCPAPEAAGGPSVFLFPPKPKDTLMISRTPEVTCVVVDVSHEDPEVKFNWYVDGVEVHNAKTKPREEQYNSTYRVVSVLTVLHQDWLNGKEYKCKVSNKALGAPIEKTISKAKGQPREPQVYTLPPSREEMTKNQVSLTCLVKGFYPSDIAVEWESNGQPENNYKTTPPVLDSDGSFFLYSKLTVDKSRWQQGNVFSCSVMHEALHNHYTQKSLSLSPGK

SEQ ID NO: 66 - protein, 216 aa, Artificial Sequence; identical to SEQ ID NO: 49
  Made in Lab - WNT surrogate molecule

SEQ ID NO: 67 - protein, 707 aa, Artificial Sequence
  Made in Lab - WNT surrogate molecule
EVQLVESGGGLVQPGGSLRLSCAASGFTFTSYYISWVRQAPGKGLEWVAEISPYSGSTYYADSVKGRFTISADTSKNTAYLQMNSLRAEDTAVYYCALRARPPIRLHPRGSVMDYWGQGTLVTVSSGSAASGSSGGSSSGADIQMTQSPSSLSASVGDRVTITCRASQDVSTAVAWYQQKPGKAPKLLIYSASFLYSGVPSRFSGSGSGTDFTLTISSLQPEDFATYYCQQSYTTPPTFGQGTKVEIKGGGGSGGGGSGGGGSEVQLVESGGGLVQPGGSLRLSCAASGFNISYSYIHWVRQAPGKGLEWVASIYSSSGSTSYADSVKGRFTISADTSKNTAYLQMNSLRAEDTAVYYCARGAIDYWGQGTLVTVSSASTKGPSVFPLAPSSKSTSGGTAALGCLVKDYFPEPVTVSWNSGALTSGVHTFPAVLQSSGLYSLSSVVTVPSSSLGTQTYICNVNHKPSNTKVDKKVEPKSCDKTHTCPPCPAPEAAGGPSVFLFPPKPKDTLMISRTPEVTCVVVDVSHEDPEVKFNWYVDGVEVHNAKTKPREEQYNSTYRVVSVLTVLHQDWLNGKEYKCKVSNKALGAPIEKTISKAKGQPREPQVYTLPPSREEMTKNQVSLTCLVKGFYPSDIAVEWESNGQPENNYKTTPPVLDSDGSFFLYSKLTVDKSRWQQGNVFSCSVMHEALHNHYTQKSLSLSPGK

SEQ ID NO: 68 - protein, 217 aa, Artificial Sequence; identical to SEQ ID NO: 52
  Made in Lab - WNT surrogate molecule

SEQ ID NO: 69 - protein, 711 aa, Artificial Sequence
  Made in Lab - WNT surrogate molecule
EVQLVESGGGLVQPGGSLRLSCAASGFTFTSYYISWVRQAPGKGLEWVAEISPYSGSTYYADSVKGRFTISADTSKNTAYLQMNSLRAEDTAVYYCALRARPPIRLHPRGSVMDYWGQGTLVTVSSGSAASGSSGGSSSGADIQMTQSPSSLSASVGDRVTITCRASQDVSTAVAWYQQKPGKAPKLLIYSASFLYSGVPSRFSGSGSGTDFTLTISSLQPEDFATYYCQQSYTTPPTFGQGTKVEIKGGGGSGGGGSGGGGSEVQLVESGGGLVQPGGSLRLSCAASGFNISYYYIHWVRQAPGKGLEWVASIYPSSGYTYYADSVKGRFTISADTSKNTAYLQMNSLRAEDTAVYYCARSSFYWAMDYWGQGTLVTVSSASTKGPSVFPLAPSSKSTSGGTAALGCLVKDYFPEPVTVSWNSGALTSGVHTFPAVLQSSGLYSLSSVVTVPSSSLGTQTYICNVNHKPSNTKVDKKVEPKSCDKTHTCPPCPAPEAAGGPSVFLFPPKPKDTLMISRTPEVTCVVVDVSHEDPEVKFNWYVDGVEVHNAKTKPREEQYNSTYRVVSVLTVLHQDWLNGKEYKCKVSNKALGAPIEKTISKAKGQPREPQVYTLPPSREEMTKNQVSLTCLVKGFYPSDIAVEWESNGQPENNYKTTPPVLDSDGSFFLYSKLTVDKSRWQQGNVFSCSVMHEALHNHYTQKSLSLSPGK

SEQ ID NO: 70 - protein, 215 aa, Artificial Sequence
  Made in Lab - WNT surrogate molecule
DIQMTQSPSSLSASVGDRVTITCRASQSVSSAVAWYQQKPGKAPKLLIYSASSLYSGVPSRFSGSRSGTDFTLTISSLQPEDFATYYCQQSYAAYLFTFGQGTKVEIKRTVAAPSVFIFPPSDEQLKSGTASVVCLLNNFYPREAKVQWKVDNALQSGNSQESVTEQDSKDSTYSLSSTLTLSKADYEKHKVYACEVTHQGLSSPVTKSFNRGEC

SEQ ID NO: 71 - protein, 712 aa, Artificial Sequence
  Made in Lab - WNT surrogate molecule
EVQLVESGGGLVQPGGSLRLSCAASGFTFTSYYISWVRQAPGKGLEWVAEISPYSGSTYYADSVKGRFTISADTSKNTAYLQMNSLRAEDTAVYYCALRARPPIRLHPRGSVMDYWGQGTLVTVSSGSAASGSSGGSSSGADIQMTQSPSSLSASVGDRVTITCRASQDVSTAVAWYQQKPGKAPKLLIYSASFLYSGVPSRFSGSGSGTDFTLTISSLQPEDFATYYCQQSYTTPPTFGQGTKVEIKGGGGSGGGGSGGGGSEVQLVESGGGLVQPGGSLRLSCAASGFNLSSYSMHWVRQAPGKGLEWVAYISSYYGYTYYADSVKGRFTISADTSKNTAYLQMNSLRAEDTAVYYCARPAPGHWGFDYWGQGTLVTVSSASTKGPSVFPLAPSSKSTSGGTAALGCLVKDYFPEPVTVSWNSGALTSGVHTFPAVLQSSGLYSLSSVVTVPSSSLGTQTYICNVNHKPSNTKVDKKVEPKSCDKTHTCPPCPAPEAAGGPSVFLFPPKPKDTLMISRTPEVTCVVVDVSHEDPEVKFNWYVDGVEVHNAKTKPREEQYNSTYRVVSVLTVLHQDWLNGKEYKCKVSNKALGAPIEKTISKAKGQPREPQVYTLPPSREEMTKNQVSLTCLVKGFYPSDIAVEWESNGQPENNYKTTPPVLDSDGSFFLYSKLTVDKSRWQQGNVFSCSVMHEALHNHYTQKSLSLSPGK

SEQ ID NO: 72 - protein, 214 aa, Artificial Sequence
  Made in Lab - WNT surrogate molecule
DIQMTQSPSSLSASVGDRVTITCRASQSVSSAVAWYQQKPGKAPKLLIYSASSLYSGVPSRFSGSRSGTDFTLTISSLQPEDFATYYCQQWYYAPITFGQGTKVEIKRTVAAPSVFIFPPSDEQLKSGTASVVCLLNNFYPREAKVQWKVDNALQSGNSQESVTEQDSKDSTYSLSSTLTLSKADYEKHKVYACEVTHQGLSSPVTKSFNRGEC

SEQ ID NO: 73 - protein, 712 aa, Artificial Sequence
  Made in Lab - WNT surrogate molecule
EVQLVESGGGLVQPGGSLRLSCAASGFTFTSYYISWVRQAPGKGLEWVAEISPYSGSTYYADSVKGRFTISADTSKNTAYLQMNSLRAEDTAVYYCALRARPPIRLHPRGSVMDYWGQGTLVTVSSGSAASGSSGGSSSGADIQMTQSPSSLSASVGDRVTITCRASQDVSTAVAWYQQKPGKAPKLLIYSASFLYSGVPSRFSGSGSGTDFTLTISSLQPEDFATYYCQQSYTTPPTFGQGTKVEIKGGGGSGGGGSGGGGSQVQLVQSGAEVKKPGASVKVSCKASGGTFSSYAISWVRQAPGQGLEWMGWINAGNGNTTYAQKFQGRVTMTRDTSTSTVYMELSSLRSEDTAVYYCARHYYGSGSYPDWGQGTLVTVSSASTKGPSVFPLAPSSKSTSGGTAALGCLVKDYFPEPVTVSWNSGALTSGVHTFPAVLQSSGLYSLSSVVTVPSSSLGTQTYICNVNHKPSNTKVDKKVEPKSCDKTHTCPPCPAPEAAGGPSVFLFPPKPKDTLMISRTPEVTCVVVDVSHEDPEVKFNWYVDGVEVHNAKTKPREEQYNSTYRVVSVLTVLHQDWLNGKEYKCKVSNKALGAPIEKTISKAKGQPREPQVYTLPPSREEMTKNQVSLTCLVKGFYPSDIAVEWESNGQPENNYKTTPPVLDSDGSFFLYSKLTVDKSRWQQGNVFSCSVMHEALHNHYTQKSLSLSPGK

SEQ ID NO: 74 - protein, 214 aa, Artificial Sequence
  Made in Lab - WNT surrogate molecule
DIQMTQSPSSPSASVGDRVTITCRASQSISSYLNWYQQKPGKAPKLLIYAASSLQSGVPSRFSGSGSGTDFTLTISSLQPEDFATYYCQQSYSTPLTFGGGTKVEIKRTVAAPSVFIFPPSDEQLKSGTASVVCLLNNFYPREAKVQWKVDNALQSGNSQESVTEQDSKDSTYSLSSTLTLSKADYEKHKVYACEVTHQGLSSPVTKSFNRGEC

SEQ ID NO: 75 - protein, 719 aa, Artificial Sequence
  Made in Lab - WNT surrogate molecule
EVQLVESGGGLVQPGGSLRLSCAASGFTFTSYYISWVRQAPGKGLEWVAEISPYSGSTYYADSVKGRFTISADTSKNTAYLQMNSLRAEDTAVYYCALRARPPIRLHPRGSVMDYWGQGTLVTVSSGSAASGSSGGSSSGADIQMTQSPSSLSASVGDRVTITCRASQDVSTAVAWYQQKPGKAPKLLIYSASFLYSGVPSRFSGSGSGTDFTLTISSLQPEDFATYYCQQSYTTPPTFGQGTKVEIKGGGGSGGGGSGGGGSEVQLVESGGGLVQPGGSLRLSCAASGFTFSSFNMFWVRQAPGKGLEWVAGIDDDGSYPNYGSAVKGRATISRDNSKNTLYLQMNSLRAEDTAVYYCAKSGYGGSWGGYIADDIDAWGQGTLVTVSSASTKGPSVFPLAPSSKSTSGGTAALGCLVKDYFPEPVTVSWNSGALTSGVHTFPAVLQSSGLYSLSSVVTVPSSSLGTQTYICNVNHKPSNTKVDKKVEPKSCDKTHTCPPCPAPEAAGGPSVFLFPPKPKDTLMISRTPEVTCVVVDVSHEDPEVKFNWYVDGVEVHNAKTKPREEQYNSTYRVVSVLTVLHQDWLNGKEYKCKVSNKALGAPIEKTISKAKGQPREPQVYTLPPSREEMTKNQVSLTCLVKGFYPSDIAVEWESNGQPENNYKTTPPVLDSDGSFFLYSKLTVDKSRWQQGNVFSCSVMHEALHNHYTQKSLSLSPGK

SEQ ID NO: 76 - protein, 213 aa, Artificial Sequence
  Made in Lab - WNT surrogate molecule
ELTQPPSVSVSPGQTARITCSGDGSYAGSYYYGWYQQKPGQAPVTLIYYNNKRPSGIPERFSGSLSGSTNTLTISGVQAEDEADYYCGSADNSGAAFGGGTKLTVLRTVAAPSVFIFPPSDEQLKSGTASVVCLLNNFYPREAKVQWKVDNALQSGNSQESVTEQDSKDSTYSLSSTLTLSKADYEKHKVYACEVTHQGLSSPVTKSFNRGEC

SEQ ID NO: 77 - protein, 722 aa, Artificial Sequence
  Made in Lab - WNT surrogate molecule
EVQLVESGGGLVQPGGSLRLSCAASGFTFTSYYISWVRQAPGKGLEWVAEISPYSGSTYYADSVKGRFTISADTSKNTAYLQMNSLRAEDTAVYYCALRARPPIRLHPRGSVMDYWGQGTLVTVSSGSAASGSSGGSSSGADIQMTQSPSSLSASVGDRVTITCRASQDVSTAVAWYQQKPGKAPKLLIYSASFLYSGVPSRFSGSGSGTDFTLTISSLQPEDFATYYCQQSYTTPPTFGQGTKVEIKGGGGSGGGGSGGGGSEVQLVESGGGLVQPGGSLRLSCAASGFTFSHYTLSWVRQAPGKGLEWVSVISGDGSYTYYADSVKGRFTISSDNSKNTLYLQMNSLRAEDTAVYYCARNFIKYVFANWGQGTLVTVSSASTKGPSVFPLAPSSKSTSGGTAALGCLVKDYFPEPVTVSWNSGALTSGVHTFPAVLQSSGLYSLSSVVTVPSSSLGTQTYICNVNHKPSNTKVDKKVEPKSCDKTHTCPPCPAPEAAGGPSVFLFPPKPKDTLMISRTPEVTCVVVDVSHEDPEVKFNWYVDGVEVHNAKTKPREEQYNSTYRVVSVLTVLHQDWLNGKEYKCKVSNKALGAPIEKTISKAKGQPREPQVYTLPPSREEMTKNQVSLWCLVKGFYPSDIAVEWESNGQPENNYKTTPPVLDSDGSFFLYSKLTVDKSRWQQGNVFSCSVMHEALHNHYTQKSLSLSPGKGSGSGHHHHHH

SEQ ID NO: 78 - protein, 461 aa, Artificial Sequence
  Made in Lab - WNT surrogate molecule
EVQLVESGGGLVQPGGSLRLSCAASGFTFSHYTLSWVRQAPGKGLEWVSVISGDGSYTYYADSVKGRFTISSDNSKNTLYLQMNSLRAEDTAVYYCARNFIKYVFANWGQGTLVTVSSASTKGPSVFPLAPSSKSTSGGTAALGCLVKDYFPEPVTVSWNSGALTSGVHTFPAVLQSSGLYSLSSVVTVPSSSLGTQTYICNVNHKPSNTKVDKKVEPKSCDKTHTCPPCPAPEAAGGPSVFLFPPKPKDTLMISRTPEVTCVVVDVSHEDPEVKFNWYVDGVEVHNAKTKPREEQYNSTYRVVSVLTVLHQDWLNGKEYKCKVSNKALGAPIEKTISKAKGQPREPQVYTLPPSREEMTKNQVSLSCAVKGFYPSDIAVEWESNGQPENNYKTTPPVLDSDGSFFLVSKLTVDKSRWQQGNVFSCSVMHEALHNHYTQKSLSLSPGKGSGSGDYKDDDDK

SEQ ID NO: 79 - protein, 213 aa, Artificial Sequence; identical to SEQ ID NO: 22
  Made in Lab - WNT surrogate molecule

SEQ ID NO: 80 - protein, 721 aa, Artificial Sequence
  Made in Lab - WNT surrogate molecule
EVQLVESGGGLVQPGGSLRLSCAASGFTFTSYYISWVRQAPGKGLEWVAEISPYSGSTYYADSVKGRFTISADTSKNTAYLQMNSLRAEDTAVYYCALRARPPIRLHPRGSVMDYWGQGTLVTVSSGSAASGSSGGSSSGADIQMTQSPSSLSASVGDRVTITCRASQDVSTAVAWYQQKPGKAPKLLIYSASFLYSGVPSRFSGSGSGTDFTLTISSLQPEDFATYYCQQSYTTPPTFGQGTKVEIKGGGGSGGGGSGGGGSEVQLVESGGGLVQPGGSLRLSCAASGFNISSSYIHWVRQAPGKGLEWVAYIYSSYGSTYYADSVKGRFTISADTSKNTAYLQMNSLRAEDTAVYYCARASWYALDYWGQGTLVTVSSASTKGPSVFPLAPSSKSTSGGTAALGCLVKDYFPEPVTVSWNSGALTSGVHTFPAVLQSSGLYSLSSVVTVPSSSLGTQTYICNVNHKPSNTKVDKKVEPKSCDKTHTCPPCPAPEAAGGPSVFLFPPKPKDTLMISRTPEVTCVVVDVSHEDPEVKFNWYVDGVEVHNAKTKPREEQYNSTYRVVSVLTVLHQDWLNGKEYKCKVSNKALGAPIEKTISKAKGQPREPQVYTLPPSREEMTKNQVSLWCLVKGFYPSDIAVEWESNGQPENNYKTTPPVLDSDGSFFLYSKLTVDKSRWQQGNVFSCSVMHEALHNHYTQKSLSLSPGKGSGSGHHHHHH

SEQ ID NO: 81 - protein, 460 aa, Artificial Sequence
  Made in Lab - WNT surrogate molecule
EVQLVESGGGLVQPGGSLRLSCAASGFNISSSYIHWVRQAPGKGLEWVAYIYSSYGSTYYADSVKGRFTISADTSKNTAYLQMNSLRAEDTAVYYCARASWYALDYWGQGTLVTVSSASTKGPSVFPLAPSSKSTSGGTAALGCLVKDYFPEPVTVSWNSGALTSGVHTFPAVLQSSGLYSLSSVVTVPSSSLGTQTYICNVNHKPSNTKVDKKVEPKSCDKTHTCPPCPAPEAAGGPSVFLFPPKPKDTLMISRTPEVTCVVVDVSHEDPEVKFNWYVDGVEVHNAKTKPREEQYNSTYRVVSVLTVLHQDWLNGKEYKCKVSNKALGAPIEKTISKAKGQPREPQVYTLPPSREEMTKNQVSLSCAVKGFYPSDIAVEWESNGQPENNYKTTPPVLDSDGSFFLVSKLTVDKSRWQQGNVFSCSVMHEALHNHYTQKSLSLSPGKGSGSGDYKDDDDK

SEQ ID NO: 82 - protein, 216 aa, Artificial Sequence; identical to SEQ ID NO: 49
  Made in Lab - WNT surrogate molecule

SEQ ID NO: 83 - protein, 718 aa, Artificial Sequence
  Made in Lab - WNT surrogate molecule
EVQLVESGGGLVQPGGSLRLSCAASGFTFTSYYISWVRQAPGKGLEWVAEISPYSGSTYYADSVKGRFTISADTSKNTAYLQMNSLRAEDTAVYYCALRARPPIRLHPRGSVMDYWGQGTLVTVSSGSAASGSSGGSSSGADIQMTQSPSSLSASVGDRVTITCRASQDVSTAVAWYQQKPGKAPKLLIYSASFLYSGVPSRFSGSGSGTDFTLTISSLQPEDFATYYCQQSYTTPPTFGQGTKVEIKGGGGSGGGGSGGGGSEVQLVESGGGLVQPGGSLRLSCAASGFNISYSYIHWVRQAPGKGLEWVASIYSSSGSTSYADSVKGRFTISADTSKNTAYLQMNSLRAEDTAVYYCARGAIDYWGQGTLVTVSSASTKGPSVFPLAPSSKSTSGGTAALGCLVKDYFPEPVTVSWNSGALTSGVHTFPAVLQSSGLYSLSSVVTVPSSSLGTQTYICNVNHKPSNTKVDKKVEPKSCDKTHTCPPCPAPEAAGGPSVFLFPPKPKDTLMISRTPEVTCVVVDVSHEDPEVKFNWYVDGVEVHNAKTKPREEQYNSTYRVVSVLTVLHQDWLNGKEYKCKVSNKALGAPIEKTISKAKGQPREPQVYTLPPSREEMTKNQVSLWCLVKGFYPSDIAVEWESNGQPENNYKTTPPVLDSDGSFFLYSKLTVDKSRWQQGNVFSCSVMHEALHNHYTQKSLSLSPGKGSGSGHHHHHH

SEQ ID NO: 84 - protein, 457 aa, Artificial Sequence
  Made in Lab - WNT surrogate molecule
EVQLVESGGGLVQPGGSLRLSCAASGFNISYSYIHWVRQAPGKGLEWVASIYSSSGSTSYADSVKGRFTISADTSKNTAYLQMNSLRAEDTAVYYCARGAIDYWGQGTLVTVSSASTKGPSVFPLAPSSKSTSGGTAALGCLVKDYFPEPVTVSWNSGALTSGVHTFPAVLQSSGLYSLSSVVTVPSSSLGTQTYICNVNHKPSNTKVDKKVEPKSCDKTHTCPPCPAPEAAGGPSVFLFPPKPKDTLMISRTPEVTCVVVDVSHEDPEVKFNWYVDGVEVHNAKTKPREEQYNSTYRVVSVLTVLHQDWLNGKEYKCKVSNKALGAPIEKTISKAKGQPREPQVYTLPPSREEMTKNQVSLSCAVKGFYPSDIAVEWESNGQPENNYKTTPPVLDSDGSFFLVSKLTVDKSRWQQGNVFSCSVMHEALHNHYTQKSLSLSPGKGSGSGDYKDDDDK

SEQ ID NO: 85 - protein, 217 aa, Artificial Sequence; identical to SEQ ID NO: 52
  Made in Lab - WNT surrogate molecule

SEQ ID NO: 86 - protein, 722 aa, Artificial Sequence
  Made in Lab - WNT surrogate molecule
EVQLVESGGGLVQPGGSLRLSCAASGFTFTSYYISWVRQAPGKGLEWVAEISPYSGSTYYADSVKGRFTISADTSKNTAYLQMNSLRAEDTAVYYCALRARPPIRLHPRGSVMDYWGQGTLVTVSSGSAASGSSGGSSSGADIQMTQSPSSLSASVGDRVTITCRASQDVSTAVAWYQQKPGKAPKLLIYSASFLYSGVPSRFSGSGSGTDFTLTISSLQPEDFATYYCQQSYTTPPTFGQGTKVEIKGGGGSGGGGSGGGGSEVQLVESGGGLVQPGGSLRLSCAASGFNISYYYIHWVRQAPGKGLEWVASIYPSSGYTYYADSVKGRFTISADTSKNTAYLQMNSLRAEDTAVYYCARSSFYWAMDYWGQGTLVTVSSASTKGPSVFPLAPSSKSTSGGTAALGCLVKDYFPEPVTVSWNSGALTSGVHTFPAVLQSSGLYSLSSVVTVPSSSLGTQTYICNVNHKPSNTKVDKKVEPKSCDKTHTCPPCPAPEAAGGPSVFLFPPKPKDTLMISRTPEVTCVVVDVSHEDPEVKFNWYVDGVEVHNAKTKPREEQYNSTYRVVSVLTVLHQDWLNGKEYKCKVSNKALGAPIEKTISKAKGQPREPQVYTLPPSREEMTKNQVSLWCLVKGFYPSDIAVEWESNGQPENNYKTTPPVLDSDGSFFLYSKLTVDKSRWQQGNVFSCSVMHEALHNHYTQKSLSLSPGKGSGSGHHHHHH

SEQ ID NO: 87 - protein, 461 aa, Artificial Sequence
  Made in Lab - WNT surrogate molecule
EVQLVESGGGLVQPGGSLRLSCAASGFNISYYYIHWVRQAPGKGLEWVASIYPSSGYTYYADSVKGRFTISADTSKNTAYLQMNSLRAEDTAVYYCARSSFYWAMDYWGQGTLVTVSSASTKGPSVFPLAPSSKSTSGGTAALGCLVKDYFPEPVTVSWNSGALTSGVHTFPAVLQSSGLYSLSSVVTVPSSSLGTQTYICNVNHKPSNTKVDKKVEPKSCDKTHTCPPCPAPEAAGGPSVFLFPPKPKDTLMISRTPEVTCVVVDVSHEDPEVKFNWYVDGVEVHNAKTKPREEQYNSTYRVVSVLTVLHQDWLNGKEYKCKVSNKALGAPIEKTISKAKGQPREPQVYTLPPSREEMTKNQVSLSCAVKGFYPSDIAVEWESNGQPENNYKTTPPVLDSDGSFFLVSKLTVDKSRWQQGNVFSCSVMHEALHNHYTQKSLSLSPGKGSGSGDYKDDDDK

SEQ ID NO: 88 - protein, 215 aa, Artificial Sequence; identical to SEQ ID NO: 70
  Made in Lab - WNT surrogate molecule

SEQ ID NO: 89 - protein, 723 aa, Artificial Sequence
  Made in Lab - WNT surrogate molecule
EVQLVESGGGLVQPGGSLRLSCAASGFTFTSYYISWVRQAPGKGLEWVAEISPYSGSTYYADSVKGRFTISADTSKNTAYLQMNSLRAEDTAVYYCALRARPPIRLHPRGSVMDYWGQGTLVTVSSGSAASGSSGGSSSGADIQMTQSPSSLSASVGDRVTITCRASQDVSTAVAWYQQKPGKAPKLLIYSASFLYSGVPSRFSGSGSGTDFTLTISSLQPEDFATYYCQQSYTTPPTFGQGTKVEIKGGGGSGGGGSGGGGSEVQLVESGGGLVQPGGSLRLSCAASGFNLSSYSMHWVRQAPGKGLEWVAYISSYYGYTYYADSVKGRFTISADTSKNTAYLQMNSLRAEDTAVYYCARPAPGHWGFDYWGQGTLVTVSSASTKGPSVFPLAPSSKSTSGGTAALGCLVKDYFPEPVTVSWNSGALTSGVHTFPAVLQSSGLYSLSSVVTVPSSSLGTQTYICNVNHKPSNTKVDKKVEPKSCDKTHTCPPCPAPEAAGGPSVFLFPPKPKDTLMISRTPEVTCVVVDVSHEDPEVKFNWYVDGVEVHNAKTKPREEQYNSTYRVVSVLTVLHQDWLNGKEYKCKVSNKALGAPIEKTISKAKGQPREPQVYTLPPSREEMTKNQVSLWCLVKGFYPSDIAVEWESNGQPENNYKTTPPVLDSDGSFFLYSKLTVDKSRWQQGNVFSCSVMHEALHNHYTQKSLSLSPGKGSGSGHHHHHH

SEQ ID NO: 90 - protein, 462 aa, Artificial Sequence
  Made in Lab - WNT surrogate molecule
EVQLVESGGGLVQPGGSLRLSCAASGFNLSSYSMHWVRQAPGKGLEWVAYISSYYGYTYYADSVKGRFTISADTSKNTAYLQMNSLRAEDTAVYYCARPAPGHWGFDYWGQGTLVTVSSASTKGPSVFPLAPSSKSTSGGTAALGCLVKDYFPEPVTVSWNSGALTSGVHTFPAVLQSSGLYSLSSVVTVPSSSLGTQTYICNVNHKPSNTKVDKKVEPKSCDKTHTCPPCPAPEAAGGPSVFLFPPKPKDTLMISRTPEVTCVVVDVSHEDPEVKFNWYVDGVEVHNAKTKPREEQYNSTYRVVSVLTVLHQDWLNGKEYKCKVSNKALGAPIEKTISKAKGQPREPQVYTLPPSREEMTKNQVSLSCAVKGFYPSDIAVEWESNGQPENNYKTTPPVLDSDGSFFLVSKLTVDKSRWQQGNVFSCSVMHEALHNHYTQKSLSLSPGKGSGSGDYKDDDDK

SEQ ID NO: 91 - protein, 214 aa, Artificial Sequence; identical to SEQ ID NO: 72
  Made in Lab - WNT surrogate molecule

SEQ ID NO: 92 - protein, 723 aa, Artificial Sequence
  Made in Lab - WNT surrogate molecule
EVQLVESGGGLVQPGGSLRLSCAASGFTFTSYYISWVRQAPGKGLEWVAEISPYSGSTYYADSVKGRFTISADTSKNTAYLQMNSLRAEDTAVYYCALRARPPIRLHPRGSVMDYWGQGTLVTVSSGSAASGSSGGSSSGADIQMTQSPSSLSASVGDRVTITCRASQDVSTAVAWYQQKPGKAPKLLIYSASFLYSGVPSRFSGSGSGTDFTLTISSLQPEDFATYYCQQSYTTPPTFGQGTKVEIKGGGGSGGGGSGGGGSQVQLVQSGAEVKKPGASVKVSCKASGGTFSSYAISWVRQAPGQGLEWMGWINAGNGNTTYAQKFQGRVTMTRDTSTSTVYMELSSLRSEDTAVYYCARHYYGSGSYPDWGQGTLVTVSSASTKGPSVFPLAPSSKSTSGGTAALGCLVKDYFPEPVTVSWNSGALTSGVHTFPAVLQSSGLYSLSSVVTVPSSSLGTQTYICNVNHKPSNTKVDKKVEPKSCDKTHTCPPCPAPEAAGGPSVFLFPPKPKDTLMISRTPEVTCVVVDVSHEDPEVKFNWYVDGVEVHNAKTKPREEQYNSTYRVVSVLTVLHQDWLNGKEYKCKVSNKALGAPIEKTISKAKGQPREPQVYTLPPSREEMTKNQVSLWCLVKGFYPSDIAVEWESNGQPENNYKTTPPVLDSDGSFFLYSKLTVDKSRWQQGNVFSCSVMHEALHNHYTQKSLSLSPGKGSGSGHHHHHH

SEQ ID NO: 93 - protein, 462 aa, Artificial Sequence
  Made in Lab - WNT surrogate molecule
QVQLVQSGAEVKKPGASVKVSCKASGGTFSSYAISWVRQAPGQGLEWMGWINAGNGNTTYAQKFQGRVTMTRDTSTSTVYMELSSLRSEDTAVYYCARHYYGSGSYPDWGQGTLVTVSSASTKGPSVFPLAPSSKSTSGGTAALGCLVKDYFPEPVTVSWNSGALTSGVHTFPAVLQSSGLYSLSSVVTVPSSSLGTQTYICNVNHKPSNTKVDKKVEPKSCDKTHTCPPCPAPEAAGGPSVFLFPPKPKDTLMISRTPEVTCVVVDVSHEDPEVKFNWYVDGVEVHNAKTKPREEQYNSTYRVVSVLTVLHQDWLNGKEYKCKVSNKALGAPIEKTISKAKGQPREPQVYTLPPSREEMTKNQVSLSCAVKGFYPSDIAVEWESNGQPENNYKTTPPVLDSDGSFFLVSKLTVDKSRWQQGNVFSCSVMHEALHNHYTQKSLSLSPGKGSGSGDYKDDDDK

SEQ ID NO: 94 - protein, 214 aa, Artificial Sequence; identical to SEQ ID NO: 74
  Made in Lab - WNT surrogate molecule

SEQ ID NO: 95 - protein, 730 aa, Artificial Sequence
  Made in Lab - WNT surrogate molecule
EVQLVESGGGLVQPGGSLRLSCAASGFTFTSYYISWVRQAPGKGLEWVAEISPYSGSTYYADSVKGRFTISADTSKNTAYLQMNSLRAEDTAVYYCALRARPPIRLHPRGSVMDYWGQGTLVTVSSGSAASGSSGGSSSGADIQMTQSPSSLSASVGDRVTITCRASQDVSTAVAWYQQKPGKAPKLLIYSASFLYSGVPSRFSGSGSGTDFTLTISSLQPEDFATYYCQQSYTTPPTFGQGTKVEIKGGGGSGGGGSGGGGSEVQLVESGGGLVQPGGSLRLSCAASGFTFSSFNMFWVRQAPGKGLEWVAGIDDDGSYPNYGSAVKGRATISRDNSKNTLYLQMNSLRAEDTAVYYCAKSGYGGSWGGYIADDIDAWGQGTLVTVSSASTKGPSVFPLAPSSKSTSGGTAALGCLVKDYFPEPVTVSWNSGALTSGVHTFPAVLQSSGLYSLSSVVTVPSSSLGTQTYICNVNHKPSNTKVDKKVEPKSCDKTHTCPPCPAPEAAGGPSVFLFPPKPKDTLMISRTPEVTCVVVDVSHEDPEVKFNWYVDGVEVHNAKTKPREEQYNSTYRVVSVLTVLHQDWLNGKEYKCKVSNKALGAPIEKTISKAKGQPREPQVYTLPPSREEMTKNQVSLWCLVKGFYPSDIAVEWESNGQPENNYKTTPPVLDSDGSFFLYSKLTVDKSRWQQGNVFSCSVMHEALHNHYTQKSLSLSPGKGSGSGHHHHHH

SEQ ID NO: 96 - protein, 469 aa, Artificial Sequence
  Made in Lab - WNT surrogate molecule
EVQLVESGGGLVQPGGSLRLSCAASGFTFSSFNMFWVRQAPGKGLEWVAGIDDDGSYPNYGSAVKGRATISRDNSKNTLYLQMNSLRAEDTAVYYCAKSGYGGSWGGYIADDIDAWGQGTLVTVSSASTKGPSVFPLAPSSKSTSGGTAALGCLVKDYFPEPVTVSWNSGALTSGVHTFPAVLQSSGLYSLSSVVTVPSSSLGTQTYICNVNHKPSNTKVDKKVEPKSCDKTHTCPPCPAPEAAGGPSVFLFPPKPKDTLMISRTPEVTCVVVDVSHEDPEVKFNWYVDGVEVHNAKTKPREEQYNSTYRVVSVLTVLHQDWLNGKEYKCKVSNKALGAPIEKTISKAKGQPREPQVYTLPPSREEMTKNQVSLSCAVKGFYPSDIAVEWESNGQPENNYKTTPPVLDSDGSFFLVSKLTVDKSRWQQGNVFSCSVMHEALHNHYTQKSLSLSPGKGSGSGDYKDDDDK

SEQ ID NO: 97 - protein, 213 aa, Artificial Sequence; identical to SEQ ID NO: 76
  Made in Lab - WNT surrogate molecule

SEQ ID NO: 98 - protein, 215 aa, Artificial Sequence; identical to SEQ ID NO: 70
  Made in Lab - RSPO mimetic molecule

SEQ ID NO: 99 - protein, 570 aa, Artificial Sequence
  Made in Lab - RSPO mimetic molecule
EVQLVESGGGLVQPGGSLRLSCAASGFNISYYYIHWVRQAPGKGLEWVASIYPSSGYTYYADSVKGRFTISADTSKNTAYLQMNSLRAEDTAVYYCARSSFYWAMDYWGQGTLVTVSSASTKGPSVFPLAPSSKSTSGGTAALGCLVKDYFPEPVTVSWNSGALTSGVHTFPAVLQSSGLYSLSSVVTVPSSSLGTQTYICNVNHKPSNTKVDKKVEPKSCDKTHTCPPCPAPEAAGGPSVFLFPPKPKDTLMISRTPEVTCVVVDVSHEDPEVKFNWYVDGVEVHNAKTKPREEQYNSTYRVVSVLTVLHQDWLNGKEYKCKVSNKALGAPIEKTISKAKGQPREPQVYTLPPSREEMTKNQVSLTCLVKGFYPSDIAVEWESNGQPENNYKTTPPVLDSDGSFFLYSKLTVDKSRWQQGNVFSCSVMHEALHNHYTQKSLSLSPGKGGGGSGSGGSGGGGSNPICKGCLSCSKDNGCSRCQQKLFFFLRREGMRQYGECLHSCPSGYYGHRAPDMNRCARCRIENCDSCRSKDACTKCKVGFYLHRGRCFDECPDGFAPLEETMECVE

SEQ ID NO: 100 - protein, 213 aa, Artificial Sequence; identical to SEQ ID NO: 76
  Made in Lab - RSPO mimetic molecule

SEQ ID NO: 101 - protein, 578 aa, Artificial Sequence
  Made in Lab - RSPO mimetic molecule
EVQLVESGGGLVQPGGSLRLSCAASGFTFSSFNMFWVRQAPGKGLEWVAGIDDDGSYPNYGSAVKGRATISRDNSKNTLYLQMNSLRAEDTAVYYCAKSGYGGSWGGYIADDIDAWGQGTLVTVSSASTKGPSVFPLAPSSKSTSGGTAALGCLVKDYFPEPVTVSWNSGALTSGVHTFPAVLQSSGLYSLSSVVTVPSSSLGTQTYICNVNHKPSNTKVDKKVEPKSCDKTHTCPPCPAPEAAGGPSVFLFPPKPKDTLMISRTPEVTCVVVDVSHEDPEVKFNWYVDGVEVHNAKTKPREEQYNSTYRVVSVLTVLHQDWLNGKEYKCKVSNKALGAPIEKTISKAKGQPREPQVYTLPPSREEMTKNQVSLTCLVKGFYPSDIAVEWESNGQPENNYKTTPPVLDSDGSFFLYSKLTVDKSRWQQGNVFSCSVMHEALHNHYTQKSLSLSPGKGGGGSGSGGSGGGGSNPICKGCLSCSKDNGCSRCQQKLFFFLRREGMRQYGECLHSCPSGYYGHRAPDMNRCARCRIENCDSCRSKDACTKCKVGFYLHRGRCFDECPDGFAPLEETMECVE

SEQ ID NO: 102 - protein, 214 aa, Artificial Sequence; identical to SEQ ID NO: 35
  Made in Lab - RSPO mimetic molecule

SEQ ID NO: 103 - protein, 569 aa, Artificial Sequence; identical to SEQ ID NO: 36
  Made in Lab - RSPO mimetic molecule

SEQ ID NO: 104 - protein, 711 aa, Artificial Sequence
  Made in Lab - RSPO mimetic molecule
EVQLVESGGGLVQPGGSLRLSCAASGFTFTSYYISWVRQAPGKGLEWVAEISPYSGSTYYADSVKGRFTISADTSKNTAYLQMNSLRAEDTAVYYCALRARPPIRLHPRGSVMDYWGQGTLVTVSSGGGGSGGGGSGGGGSEVQLVESGGGLVQPGGSLRLSCAASGFNISYYYIHWVRQAPGKGLEWVASIYPSSGYTYYADSVKGRFTISADTSKNTAYLQMNSLRAEDTAVYYCARSSFYWAMDYWGQGTLVTVSSASTKGPSVFPLAPSSKSTSGGTAALGCLVKDYFPEPVTVSWNSGALTSGVHTFPAVLQSSGLYSLSSVVTVPSSSLGTQTYICNVNHKPSNTKVDKKVEPKSCDKTHTCPPCPAPEAAGGPSVFLFPPKPKDTLMISRTPEVTCVVVDVSHEDPEVKFNWYVDGVEVHNAKTKPREEQYNSTYRVVSVLTVLHQDWLNGKEYKCKVSNKALGAPIEKTISKAKGQPREPQVYTLPPSREEMTKNQVSLTCLVKGFYPSDIAVEWESNGQPENNYKTTPPVLDSDGSFFLYSKLTVDKSRWQQGNVFSCSVMHEALHNHYTQKSLSLSPGKGGGGSGSGGSGGGGSNPICKGCLSCSKDNGCSRCQQKLFFFLRREGMRQYGECLHSCPSGYYGHRAPDMNRCARCRIENCDSCRSKDACTKCKVGFYLHRGRCFDECPDGFAPLEETMECVE

SEQ ID NO: 105 - protein, 337 aa, Artificial Sequence; identical to SEQ ID NO: 29
  Made in Lab - RSPO mimetic molecule

SEQ ID NO: 106 - protein, 719 aa, Artificial Sequence
  Made in Lab - RSPO mimetic molecule
EVQLVESGGGLVQPGGSLRLSCAASGFTFTSYYISWVRQAPGKGLEWVAEISPYSGSTYYADSVKGRFTISADTSKNTAYLQMNSLRAEDTAVYYCALRARPPIRLHPRGSVMDYWGQGTLVTVSSGGGGSGGGGSGGGGSEVQLVESGGGLVQPGGSLRLSCAASGFTFSSFNMFWVRQAPGKGLEWVAGIDDDGSYPNYGSAVKGRATISRDNSKNTLYLQMNSLRAEDTAVYYCAKSGYGGSWGGYIADDIDAWGQGTLVTVSSASTKGPSVFPLAPSSKSTSGGTAALGCLVKDYFPEPVTVSWNSGALTSGVHTFPAVLQSSGLYSLSSVVTVPSSSLGTQTYICNVNHKPSNTKVDKKVEPKSCDKTHTCPPCPAPEAAGGPSVFLFPPKPKDTLMISRTPEVTCVVVDVSHEDPEVKFNWYVDGVEVHNAKTKPREEQYNSTYRVVSVLTVLHQDWLNGKEYKCKVSNKALGAPIEKTISKAKGQPREPQVYTLPPSREEMTKNQVSLTCLVKGFYPSDIAVEWESNGQPENNYKTTPPVLDSDGSFFLYSKLTVDKSRWQQGNVFSCSVMHEALHNHYTQKSLSLSPGKGGGGSGSGGSGGGGSNPICKGCLSCSKDNGCSRCQQKLFFFLRREGMRQYGECLHSCPSGYYGHRAPDMNRCARCRIENCDSCRSKDACTKCKVGFYLHRGRCFDECPDGFAPLEETMECVE

SEQ ID NO: 107 - protein, 335 aa, Artificial Sequence; identical to SEQ ID NO: 31
  Made in Lab - RSPO mimetic molecule

SEQ ID NO: 108 - protein, 712 aa, Artificial Sequence
  Made in Lab - RSPO mimetic molecule
EVQLVESGGGLVQPGGSLRLSCAASGFTFTSYYISWVRQAPGKGLEWVAEISPYSGSTYYADSVKGRFTISADTSKNTAYLQMNSLRAEDTAVYYCALRARPPIRLHPRGSVMDYWGQGTLVTVSSGGGGSGGGGSGGGGSEVQLVESGGGLVQPGGSLRLSCAASGFNLSSYSMHWVRQAPGKGLEWVAYISSYYGYTYYADSVKGRFTISADTSKNTAYLQMNSLRAEDTAVYYCARPAPGHWGFDYWGQGTLVTVSSASTKGPSVFPLAPSSKSTSGGTAALGCLVKDYFPEPVTVSWNSGALTSGVHTFPAVLQSSGLYSLSSVVTVPSSSLGTQTYICNVNHKPSNTKVDKKVEPKSCDKTHTCPPCPAPEAAGGPSVFLFPPKPKDTLMISRTPEVTCVVVDVSHEDPEVKFNWYVDGVEVHNAKTKPREEQYNSTYRVVSVLTVLHQDWLNGKEYKCKVSNKALGAPIEKTISKAKGQPREPQVYTLPPSREEMTKNQVSLTCLVKGFYPSDIAVEWESNGQPENNYKTTPPVLDSDGSFFLYSKLTVDKSRWQQGNVFSCSVMHEALHNHYTQKSLSLSPGKGGGGSGSGGSGGGGSNPICKGCLSCSKDNGCSRCQQKLFFFLRREGMRQYGECLHSCPSGYYGHRAPDMNRCARCRIENCDSCRSKDACTKCKVGFYLHRGRCFDECPDGFAPLEETMECVE

SEQ ID NO: 109 - protein, 336 aa, Artificial Sequence; identical to SEQ ID NO: 56
  Made in Lab - RSPO mimetic molecule

SEQ ID NO: 110 - protein, 712 aa, Artificial Sequence
  Made in Lab - RSPO mimetic molecule
EVQLVESGGGLVQPGGSLRLSCAASGFTFTSYYISWVRQAPGKGLEWVAEISPYSGSTYYADSVKGRFTISADTSKNTAYLQMNSLRAEDTAVYYCALRARPPIRLHPRGSVMDYWGQGTLVTVSSGGGGSGGGGSGGGGSEVQLVQSGAEVKKPGASVKVSCKASGGTFSSYAISWVRQAPGQGLEWMGWINAGNGNTTYAQKFQGRVTMTRDTSTSTVYMELSSLRSEDTAVYYCARHYYGSGSYPDWGQGTLVTVSSASTKGPSVFPLAPSSKSTSGGTAALGCLVKDYFPEPVTVSWNSGALTSGVHTFPAVLQSSGLYSLSSVVTVPSSSLGTQTYICNVNHKPSNTKVDKKVEPKSCDKTHTCPPCPAPEAAGGPSVFLFPPKPKDTLMISRTPEVTCVVVDVSHEDPEVKFNWYVDGVEVHNAKTKPREEQYNSTYRVVSVLTVLHQDWLNGKEYKCKVSNKALGAPIEKTISKAKGQPREPQVYTLPPSREEMTKNQVSLTCLVKGFYPSDIAVEWESNGQPENNYKTTPPVLDSDGSFFLYSKLTVDKSRWQQGNVFSCSVMHEALHNHYTQKSLSLSPGKGGGGSGSGGSGGGGSNPICKGCLSCSKDNGCSRCQQKLFFFLRREGMRQYGECLHSCPSGYYGHRAPDMNRCARCRIENCDSCRSKDACTKCKVGFYLHRGRCFDECPDGFAPLEETMECVE

SEQ ID NO: 111 - protein, 337 aa, Artificial Sequence; identical to SEQ ID NO: 58
  Made in Lab - RSPO mimetic molecule

SEQ ID NO: 112 - protein, 719 aa, Artificial Sequence; identical to SEQ ID NO: 106
  Made in Lab - RSPO mimetic molecule

SEQ ID NO: 113 - protein, 335 aa, Artificial Sequence; identical to SEQ ID NO: 31
  Made in Lab - RSPO mimetic molecule

SEQ ID NO: 114 - protein, 713 aa, Artificial Sequence
  Made in Lab - RSPO mimetic molecule
EVQLVESGGGLVQPGGSLRLSCAASGFTFTSYYISWVRQAPGKGLEWVAEISPYSGSTYYADSVKGRFTISADTSKNTAYLQMNSLRAEDTAVYYCALRARPPIRLHPRGSVMDYWGQGTLVTVSSGGGGSGGGGSGGGGSEVQLVESGGGLVQPGGSLRLSCAASGFNFSSSSIHWVRQAPGKGLEWVAYIYPSYDYTYYADSVKGRFTISADTSKNTAYLQMNSLRAEDTAVYYCARGYFYTWGGMDYWGQGTLVTVSSASTKGPSVFPLAPSSKSTSGGTAALGCLVKDYFPEPVTVSWNSGALTSGVHTFPAVLQSSGLYSLSSVVTVPSSSLGTQTYICNVNHKPSNTKVDKKVEPKSCDKTHTCPPCPAPEAAGGPSVFLFPPKPKDTLMISRTPEVTCVVVDVSHEDPEVKFNWYVDGVEVHNAKTKPREEQYNSTYRVVSVLTVLHQDWLNGKEYKCKVSNKALGAPIEKTISKAKGQPREPQVYTLPPSREEMTKNQVSLTCLVKGFYPSDIAVEWESNGQPENNYKTTPPVLDSDGSFFLYSKLTVDKSRWQQGNVFSCSVMHEALHNHYTQKSLSLSPGKGGGGSGSGGSGGGGSNPICKGCLSCSKDNGCSRCQQKLFFFLRREGMRQYGECLHSCPSGYYGHRAPDMNRCARCRIENCDSCRSKDACTKCKVGFYLHRGRCFDECPDGFAPLEETMECVE

SEQ ID NO: 115 - protein, 336 aa, Artificial Sequence; identical to SEQ ID NO: 60
  Made in Lab - RSPO mimetic molecule

SEQ ID NO: 116 - protein, 713 aa, Artificial Sequence
  Made in Lab - RSPO mimetic molecule
EVQLVESGGGLVQPGGSLRLSCAASGFTFTSYYISWVRQAPGKGLEWVAEISPYSGSTYYADSVKGRFTISADTSKNTAYLQMNSLRAEDTAVYYCALRARPPIRLHPRGSVMDYWGQGTLVTVSSGGGGSGGGGSGGGGSEVQLVESGGGLVQPGGSLRLSCAASGFNIHSSSIHWVRQAPGKGLEWVAATYSSFGSITYADSVKGRFTISADTSKNTAYLQMNSLRAEDTAVYYCARYHHPFGYALDYWGQGTLVTVSSASTKGPSVFPLAPSSKSTSGGTAALGCLVKDYFPEPVTVSWNSGALTSGVHTFPAVLQSSGLYSLSSVVTVPSSSLGTQTYICNVNHKPSNTKVDKKVEPKSCDKTHTCPPCPAPEAAGGPSVFLFPPKPKDTLMISRTPEVTCVVVDVSHEDPEVKFNWYVDGVEVHNAKTKPREEQYNSTYRVVSVLTVLHQDWLNGKEYKCKVSNKALGAPIEKTISKAKGQPREPQVYTLPPSREEMTKNQVSLTCLVKGFYPSDIAVEWESNGQPENNYKTTPPVLDSDGSFFLYSKLTVDKSRWQQGNVFSCSVMHEALHNHYTQKSLSLSPGKGGGGSGSGGSGGGGSNPICKGCLSCSKDNGCSRCQQKLFFFLRREGMRQYGECLHSCPSGYYGHRAPDMNRCARCRIENCDSCRSKDACTKCKVGFYLHRGRCFDECPDGFAPLEETMECVE

SEQ ID NO: 117 - protein, 336 aa, Artificial Sequence; identical to SEQ ID NO: 62
  Made in Lab - RSPO mimetic molecule

SEQ ID NO: 118 - protein, 833 aa, Artificial Sequence
  Made in Lab - RSPO mimetic molecule
EVQLVESGGGLVQPGGSLRLSCAASGFTFTSYYISWVRQAPGKGLEWVAEISPYSGSTYYADSVKGRFTISADTSKNTAYLQMNSLRAEDTAVYYCALRARPPIRLHPRGSVMDYWGQGTLVTVSSGSAASGSSGGSSSGADIQMTQSPSSLSASVGDRVTITCRASQDVSTAVAWYQQKPGKAPKLLIYSASFLYSGVPSRFSGSGSGTDFTLTISSLQPEDFATYYCQQSYTTPPTFGQGTKVEIKGGGGSGGGGSGGGGSEVQLVESGGGLVQPGGSLRLSCAASGFTFSHYTLSWVRQAPGKGLEWVSVISGDGSYTYYADSVKGRFTISSDNSKNTLYLQMNSLRAEDTAVYYCARNFIKYVFANWGQGTLVTVSSASTKGPSVFPLAPSSKSTSGGTAALGCLVKDYFPEPVTVSWNSGALTSGVHTFPAVLQSSGLYSLSSVVTVPSSSLGTQTYICNVNHKPSNTKVDKKVEPKSCDKTHTCPPCPAPEAAGGPSVFLFPPKPKDTLMISRTPEVTCVVVDVSHEDPEVKFNWYVDGVEVHNAKTKPREEQYNSTYRVVSVLTVLHQDWLNGKEYKCKVSNKALGAPIEKTISKAKGQPREPQVYTLPPSREEMTKNQVSLTCLVKGFYPSDIAVEWESNGQPENNYKTTPPVLDSDGSFFLYSKLTVDKSRWQQGNVFSCSVMHEALHNHYTQKSLSLSPGKGGGGSGSGGSGGGGSNPICKGCLSCSKDNGCSRCQQKLFFFLRREGMRQYGECLHSCPSGYYGHRAPDMNRCARCRIENCDSCRSKDACTKCKVGFYLHRGRCFDECPDGFAPLEETMECVE

SEQ ID NO: 119 - protein, 213 aa, Artificial Sequence; identical to SEQ ID NO: 22
  Made in Lab - RSPO mimetic molecule

SEQ ID NO: 120 - protein, 832 aa, Artificial Sequence
  Made in Lab - RSPO mimetic molecule
EVQLVESGGGLVQPGGSLRLSCAASGFTFTSYYISWVRQAPGKGLEWVAEISPYSGSTYYADSVKGRFTISADTSKNTAYLQMNSLRAEDTAVYYCALRARPPIRLHPRGSVMDYWGQGTLVTVSSGSAASGSSGGSSSGADIQMTQSPSSLSASVGDRVTITCRASQDVSTAVAWYQQKPGKAPKLLIYSASFLYSGVPSRFSGSGSGTDFTLTISSLQPEDFATYYCQQSYTTPPTFGQGTKVEIKGGGGSGGGGSGGGGSEVQLVESGGGLVQPGGSLRLSCAASGFNISSSYIHWVRQAPGKGLEWVAYIYSSYGSTYYADSVKGRFTISADTSKNTAYLQMNSLRAEDTAVYYCARASWYALDYWGQGTLVTVSSASTKGPSVFPLAPSSKSTSGGTAALGCLVKDYFPEPVTVSWNSGALTSGVHTFPAVLQSSGLYSLSSVVTVPSSSLGTQTYICNVNHKPSNTKVDKKVEPKSCDKTHTCPPCPAPEAAGGPSVFLFPPKPKDTLMISRTPEVTCVVVDVSHEDPEVKFNWYVDGVEVHNAKTKPREEQYNSTYRVVSVLTVLHQDWLNGKEYKCKVSNKALGAPIEKTISKAKGQPREPQVYTLPPSREEMTKNQVSLTCLVKGFYPSDIAVEWESNGQPENNYKTTPPVLDSDGSFFLYSKLTVDKSRWQQGNVFSCSVMHEALHNHYTQKSLSLSPGKGGGGSGSGGSGGGGSNPICKGCLSCSKDNGCSRCQQKLFFFLRREGMRQYGECLHSCPSGYYGHRAPDMNRCARCRIENCDSCRSKDACTKCKVGFYLHRGRCFDECPDGFAPLEETMECVE

SEQ ID NO: 121 - protein, 216 aa, Artificial Sequence; identical to SEQ ID NO: 49
  Made in Lab - RSPO mimetic molecule

SEQ ID NO: 122 - protein, 829 aa, Artificial Sequence
  Made in Lab - RSPO mimetic molecule
EVQLVESGGGLVQPGGSLRLSCAASGFTFTSYYISWVRQAPGKGLEWVAEISPYSGSTYYADSVKGRFTISADTSKNTAYLQMNSLRAEDTAVYYCALRARPPIRLHPRGSVMDYWGQGTLVTVSSGSAASGSSGGSSSGADIQMTQSPSSLSASVGDRVTITCRASQDVSTAVAWYQQKPGKAPKLLIYSASFLYSGVPSRFSGSGSGTDFTLTISSLQPEDFATYYCQQSYTTPPTFGQGTKVEIKGGGGSGGGGSGGGGSEVQLVESGGGLVQPGGSLRLSCAASGFNISYSYIHWVRQAPGKGLEWVASIYSSSGSTSYADSVKGRFTISADTSKNTAYLQMNSLRAEDTAVYYCARGAIDYWGQGTLVTVSSASTKGPSVFPLAPSSKSTSGGTAALGCLVKDYFPEPVTVSWNSGALTSGVHTFPAVLQSSGLYSLSSVVTVPSSSLGTQTYICNVNHKPSNTKVDKKVEPKSCDKTHTCPPCPAPEAAGGPSVFLFPPKPKDTLMISRTPEVTCVVVDVSHEDPEVKFNWYVDGVEVHNAKTKPREEQYNSTYRVVSVLTVLHQDWLNGKEYKCKVSNKALGAPIEKTISKAKGQPREPQVYTLPPSREEMTKNQVSLTCLVKGFYPSDIAVEWESNGQPENNYKTTPPVLDSDGSFFLYSKLTVDKSRWQQGNVFSCSVMHEALHNHYTQKSLSLSPGKGGGGSGSGGSGGGGSNPICKGCLSCSKDNGCSRCQQKLFFFLRREGMRQYGECLHSCPSGYYGHRAPDMNRCARCRIENCDSCRSKDACTKCKVGFYLHRGRCFDECPDGFAPLEETMECVE

SEQ ID NO: 123 - protein, 217 aa, Artificial Sequence; identical to SEQ ID NO: 52
  Made in Lab - RSPO mimetic molecule

SEQ ID NO: 124 - protein, 833 aa, Artificial Sequence
  Made in Lab - RSPO mimetic molecule
EVQLVESGGGLVQPGGSLRLSCAASGFTFTSYYISWVRQAPGKGLEWVAEISPYSGSTYYADSVKGRFTISADTSKNTAYLQMNSLRAEDTAVYYCALRARPPIRLHPRGSVMDYWGQGTLVTVSSGSAASGSSGGSSSGADIQMTQSPSSLSASVGDRVTITCRASQDVSTAVAWYQQKPGKAPKLLIYSASFLYSGVPSRFSGSGSGTDFTLTISSLQPEDFATYYCQQSYTTPPTFGQGTKVEIKGGGGSGGGGSGGGGSEVQLVESGGGLVQPGGSLRLSCAASGFNISYYYIHWVRQAPGKGLEWVASIYPSSGYTYYADSVKGRFTISADTSKNTAYLQMNSLRAEDTAVYYCARSSFYWAMDYWGQGTLVTVSSASTKGPSVFPLAPSSKSTSGGTAALGCLVKDYFPEPVTVSWNSGALTSGVHTFPAVLQSSGLYSLSSVVTVPSSSLGTQTYICNVNHKPSNTKVDKKVEPKSCDKTHTCPPCPAPEAAGGPSVFLFPPKPKDTLMISRTPEVTCVVVDVSHEDPEVKFNWYVDGVEVHNAKTKPREEQYNSTYRVVSVLTVLHQDWLNGKEYKCKVSNKALGAPIEKTISKAKGQPREPQVYTLPPSREEMTKNQVSLTCLVKGFYPSDIAVEWESNGQPENNYKTTPPVLDSDGSFFLYSKLTVDKSRWQQGNVFSCSVMHEALHNHYTQKSLSLSPGKGGGGSGSGGSGGGGSNPICKGCLSCSKDNGCSRCQQKLFFFLRREGMRQYGECLHSCPSGYYGHRAPDMNRCARCRIENCDSCRSKDACTKCKVGFYLHRGRCFDECPDGFAPLEETMECVE

SEQ ID NO: 125 - protein, 215 aa, Artificial Sequence; identical to SEQ ID NO: 70
  Made in Lab - RSPO mimetic molecule

SEQ ID NO: 126 - protein, 834 aa, Artificial Sequence
  Made in Lab - RSPO mimetic molecule
EVQLVESGGGLVQPGGSLRLSCAASGFTFTSYYISWVRQAPGKGLEWVAEISPYSGSTYYADSVKGRFTISADTSKNTAYLQMNSLRAEDTAVYYCALRARPPIRLHPRGSVMDYWGQGTLVTVSSGSAASGSSGGSSSGADIQMTQSPSSLSASVGDRVTITCRASQDVSTAVAWYQQKPGKAPKLLIYSASFLYSGVPSRFSGSGSGTDFTLTISSLQPEDFATYYCQQSYTTPPTFGQGTKVEIKGGGGSGGGGSGGGGSEVQLVESGGGLVQPGGSLRLSCAASGFNLSSYSMHWVRQAPGKGLEWVAYISSYYGYTYYADSVKGRFTISADTSKNTAYLQMNSLRAEDTAVYYCARPAPGHWGFDYWGQGTLVTVSSASTKGPSVFPLAPSSKSTSGGTAALGCLVKDYFPEPVTVSWNSGALTSGVHTFPAVLQSSGLYSLSSVVTVPSSSLGTQTYICNVNHKPSNTKVDKKVEPKSCDKTHTCPPCPAPEAAGGPSVFLFPPKPKDTLMISRTPEVTCVVVDVSHEDPEVKFNWYVDGVEVHNAKTKPREEQYNSTYRVVSVLTVLHQDWLNGKEYKCKVSNKALGAPIEKTISKAKGQPREPQVYTLPPSREEMTKNQVSLTCLVKGFYPSDIAVEWESNGQPENNYKTTPPVLDSDGSFFLYSKLTVDKSRWQQGNVFSCSVMHEALHNHYTQKSLSLSPGKGGGGSGSGGSGGGGSNPICKGCLSCSKDNGCSRCQQKLFFFLRREGMRQYGECLHSCPSGYYGHRAPDMNRCARCRIENCDSCRSKDACTKCKVGFYLHRGRCFDECPDGFAPLEETMECVE

SEQ ID NO: 127 - protein, 214 aa, Artificial Sequence; identical to SEQ ID NO: 72
  Made in Lab - RSPO mimetic molecule

SEQ ID NO: 128 - protein, 834 aa, Artificial Sequence
  Made in Lab - RSPO mimetic molecule
EVQLVESGGGLVQPGGSLRLSCAASGFTFTSYYISWVRQAPGKGLEWVAEISPYSGSTYYADSVKGRFTISADTSKNTAYLQMNSLRAEDTAVYYCALRARPPIRLHPRGSVMDYWGQGTLVTVSSGSAASGSSGGSSSGADIQMTQSPSSLSASVGDRVTITCRASQDVSTAVAWYQQKPGKAPKLLIYSASFLYSGVPSRFSGSGSGTDFTLTISSLQPEDFATYYCQQSYTTPPTFGQGTKVEIKGGGGSGGGGSGGGGSQVQLVQSGAEVKKPGASVKVSCKASGGTFSSYAISWVRQAPGQGLEWMGWINAGNGNTTYAQKFQGRVTMTRDTSTSTVYMELSSLRSEDTAVYYCARHYYGSGSYPDWGQGTLVTVSSASTKGPSVFPLAPSSKSTSGGTAALGCLVKDYFPEPVTVSWNSGALTSGVHTFPAVLQSSGLYSLSSVVTVPSSSLGTQTYICNVNHKPSNTKVDKKVEPKSCDKTHTCPPCPAPEAAGGPSVFLFPPKPKDTLMISRTPEVTCVVVDVSHEDPEVKFNWYVDGVEVHNAKTKPREEQYNSTYRVVSVLTVLHQDWLNGKEYKCKVSNKALGAPIEKTISKAKGQPREPQVYTLPPSREEMTKNQVSLTCLVKGFYPSDIAVEWESNGQPENNYKTTPPVLDSDGSFFLYSKLTVDKSRWQQGNVFSCSVMHEALHNHYTQKSLSLSPGKGGGGSGSGGSGGGGSNPICKGCLSCSKDNGCSRCQQKLFFFLRREGMRQYGECLHSCPSGYYGHRAPDMNRCARCRIENCDSCRSKDACTKCKVGFYLHRGRCFDECPDGFAPLEETMECVE

SEQ ID NO: 129 - protein, 214 aa, Artificial Sequence; identical to SEQ ID NO: 74
  Made in Lab - RSPO mimetic molecule

SEQ ID NO: 130 - protein, 841 aa, Artificial Sequence
  Made in Lab - RSPO mimetic molecule
EVQLVESGGGLVQPGGSLRLSCAASGFTFTSYYISWVRQAPGKGLEWVAEISPYSGSTYYADSVKGRFTISADTSKNTAYLQMNSLRAEDTAVYYCALRARPPIRLHPRGSVMDYWGQGTLVTVSSGSAASGSSGGSSSGADIQMTQSPSSLSASVGDRVTITCRASQDVSTAVAWYQQKPGKAPKLLIYSASFLYSGVPSRFSGSGSGTDFTLTISSLQPEDFATYYCQQSYTTPPTFGQGTKVEIKGGGGSGGGGSGGGGSEVQLVESGGGLVQPGGSLRLSCAASGFTFSSFNMFWVRQAPGKGLEWVAGIDDDGSYPNYGSAVKGRATISRDNSKNTLYLQMNSLRAEDTAVYYCAKSGYGGSWGGYIADDIDAWGQGTLVTVSSASTKGPSVFPLAPSSKSTSGGTAALGCLVKDYFPEPVTVSWNSGALTSGVHTFPAVLQSSGLYSLSSVVTVPSSSLGTQTYICNVNHKPSNTKVDKKVEPKSCDKTHTCPPCPAPEAAGGPSVFLFPPKPKDTLMISRTPEVTCVVVDVSHEDPEVKFNWYVDGVEVHNAKTKPREEQYNSTYRVVSVLTVLHQDWLNGKEYKCKVSNKALGAPIEKTISKAKGQPREPQVYTLPPSREEMTKNQVSLTCLVKGFYPSDIAVEWESNGQPENNYKTTPPVLDSDGSFFLYSKLTVDKSRWQQGNVFSCSVMHEALHNHYTQKSLSLSPGKGGGGSGSGGSGGGGSNPICKGCLSCSKDNGCSRCQQKLFFFLRREGMRQYGECLHSCPSGYYGHRAPDMNRCARCRIENCDSCRSKDACTKCKVGFYLHRGRCFDECPDGFAPLEETMECVE

SEQ ID NO: 131 - protein, 213 aa, Artificial Sequence; identical to SEQ ID NO: 76
  Made in Lab - RSPO mimetic molecule

SEQ ID NO: 132 - protein, 844 aa, Artificial Sequence
  Made in Lab - RSPO mimetic molecule
EVQLVESGGGLVQPGGSLRLSCAASGFTFTSYYISWVRQAPGKGLEWVAEISPYSGSTYYADSVKGRFTISADTSKNTAYLQMNSLRAEDTAVYYCALRARPPIRLHPRGSVMDYWGQGTLVTVSSGSAASGSSGGSSSGADIQMTQSPSSLSASVGDRVTITCRASQDVSTAVAWYQQKPGKAPKLLIYSASFLYSGVPSRFSGSGSGTDFTLTISSLQPEDFATYYCQQSYTTPPTFGQGTKVEIKGGGGSGGGGSGGGGSEVQLVESGGGLVQPGGSLRLSCAASGFTFSHYTLSWVRQAPGKGLEWVSVISGDGSYTYYADSVKGRFTISSDNSKNTLYLQMNSLRAEDTAVYYCARNFIKYVFANWGQGTLVTVSSASTKGPSVFPLAPSSKSTSGGTAALGCLVKDYFPEPVTVSWNSGALTSGVHTFPAVLQSSGLYSLSSVVTVPSSSLGTQTYICNVNHKPSNTKVDKKVEPKSCDKTHTCPPCPAPEAAGGPSVFLFPPKPKDTLMISRTPEVTCVVVDVSHEDPEVKFNWYVDGVEVHNAKTKPREEQYNSTYRVVSVLTVLHQDWLNGKEYKCKVSNKALGAPIEKTISKAKGQPREPQVYTLPPSREEMTKNQVSLWCLVKGFYPSDIAVEWESNGQPENNYKTTPPVLDSDGSFFLYSKLTVDKSRWQQGNVFSCSVMHEALHNHYTQKSLSLSPGKGGGGSGGGGSGGGGSNPICKGCLSCSKDNGCSRCQQKLFFFLRREGMRQYGECLHSCPSGYYGHRAPDMNRCARCRIENCDSCRSKDACTKCKVGFYLHRGRCFDECPDGFAPLEETMECVEGSGSGHHHHHH

SEQ ID NO: 133 - protein, 583 aa, Artificial Sequence
  Made in Lab - RSPO mimetic molecule
EVQLVESGGGLVQPGGSLRLSCAASGFTFSHYTLSWVRQAPGKGLEWVSVISGDGSYTYYADSVKGRFTISSDNSKNTLYLQMNSLRAEDTAVYYCARNFIKYVFANWGQGTLVTVSSASTKGPSVFPLAPSSKSTSGGTAALGCLVKDYFPEPVTVSWNSGALTSGVHTFPAVLQSSGLYSLSSVVTVPSSSLGTQTYICNVNHKPSNTKVDKKVEPKSCDKTHTCPPCPAPEAAGGPSVFLFPPKPKDTLMISRTPEVTCVVVDVSHEDPEVKFNWYVDGVEVHNAKTKPREEQYNSTYRVVSVLTVLHQDWLNGKEYKCKVSNKALGAPIEKTISKAKGQPREPQVYTLPPSREEMTKNQVSLSCAVKGFYPSDIAVEWESNGQPENNYKTTPPVLDSDGSFFLVSKLTVDKSRWQQGNVFSCSVMHEALHNHYTQKSLSLSPGKGGGGSGGGGSGGGGSNPICKGCLSCSKDNGCSRCQQKLFFFLRREGMRQYGECLHSCPSGYYGHRAPDMNRCARCRIENCDSCRSKDACTKCKVGFYLHRGRCFDECPDGFAPLEETMECVEGSGSGDYKDDDDK

SEQ ID NO: 134 - protein, 213 aa, Artificial Sequence; identical to SEQ ID NO: 22
  Made in Lab - RSPO mimetic molecule

SEQ ID NO: 135 - protein, 843 aa, Artificial Sequence
  Made in Lab - RSPO mimetic molecule
EVQLVESGGGLVQPGGSLRLSCAASGFTFTSYYISWVRQAPGKGLEWVAEISPYSGSTYYADSVKGRFTISADTSKNTAYLQMNSLRAEDTAVYYCALRARPPIRLHPRGSVMDYWGQGTLVTVSSGSAASGSSGGSSSGADIQMTQSPSSLSASVGDRVTITCRASQDVSTAVAWYQQKPGKAPKLLIYSASFLYSGVPSRFSGSGSGTDFTLTISSLQPEDFATYYCQQSYTTPPTFGQGTKVEIKGGGGSGGGGSGGGGSEVQLVESGGGLVQPGGSLRLSCAASGFNISSSYIHWVRQAPGKGLEWVAYIYSSYGSTYYADSVKGRFTISADTSKNTAYLQMNSLRAEDTAVYYCARASWYALDYWGQGTLVTVSSASTKGPSVFPLAPSSKSTSGGTAALGCLVKDYFPEPVTVSWNSGALTSGVHTFPAVLQSSGLYSLSSVVTVPSSSLGTQTYICNVNHKPSNTKVDKKVEPKSCDKTHTCPPCPAPEAAGGPSVFLFPPKPKDTLMISRTPEVTCVVVDVSHEDPEVKFNWYVDGVEVHNAKTKPREEQYNSTYRVVSVLTVLHQDWLNGKEYKCKVSNKALGAPIEKTISKAKGQPREPQVYTLPPSREEMTKNQVSLWCLVKGFYPSDIAVEWESNGQPENNYKTTPPVLDSDGSFFLYSKLTVDKSRWQQGNVFSCSVMHEALHNHYTQKSLSLSPGKGGGGSGGGGSGGGGSNPICKGCLSCSKDNGCSRCQQKLFFFLRREGMRQYGECLHSCPSGYYGHRAPDMNRCARCRIENCDSCRSKDACTKCKVGFYLHRGRCFDECPDGFAPLEETMECVEGSGSGHHHHHH

SEQ ID NO: 136 - protein, 582 aa, Artificial Sequence
  Made in Lab - RSPO mimetic molecule
EVQLVESGGGLVQPGGSLRLSCAASGFNISSSYIHWVRQAPGKGLEWVAYIYSSYGSTYYADSVKGRFTISADTSKNTAYLQMNSLRAEDTAVYYCARASWYALDYWGQGTLVTVSSASTKGPSVFPLAPSSKSTSGGTAALGCLVKDYFPEPVTVSWNSGALTSGVHTFPAVLQSSGLYSLSSVVTVPSSSLGTQTYICNVNHKPSNTKVDKKVEPKSCDKTHTCPPCPAPEAAGGPSVFLFPPKPKDTLMISRTPEVTCVVVDVSHEDPEVKFNWYVDGVEVHNAKTKPREEQYNSTYRVVSVLTVLHQDWLNGKEYKCKVSNKALGAPIEKTISKAKGQPREPQVYTLPPSREEMTKNQVSLSCAVKGFYPSDIAVEWESNGQPENNYKTTPPVLDSDGSFFLVSKLTVDKSRWQQGNVFSCSVMHEALHNHYTQKSLSLSPGKGGGGSGGGGSGGGGSNPICKGCLSCSKDNGCSRCQQKLFFFLRREGMRQYGECLHSCPSGYYGHRAPDMNRCARCRIENCDSCRSKDACTKCKVGFYLHRGRCFDECPDGFAPLEETMECVEGSGSGDYKDDDDK

SEQ ID NO: 137 - protein, 216 aa, Artificial Sequence; identical to SEQ ID NO: 49
  Made in Lab - RSPO mimetic molecule

SEQ ID NO: 138 - protein, 840 aa, Artificial Sequence
  Made in Lab - RSPO mimetic molecule
EVQLVESGGGLVQPGGSLRLSCAASGFTFTSYYISWVRQAPGKGLEWVAEISPYSGSTYYADSVKGRFTISADTSKNTAYLQMNSLRAEDTAVYYCALRARPPIRLHPRGSVMDYWGQGTLVTVSSGSAASGSSGGSSSGADIQMTQSPSSLSASVGDRVTITCRASQDVSTAVAWYQQKPGKAPKLLIYSASFLYSGVPSRFSGSGSGTDFTLTISSLQPEDFATYYCQQSYTTPPTFGQGTKVEIKGGGGSGGGGSGGGGSEVQLVESGGGLVQPGGSLRLSCAASGFNISYSYIHWVRQAPGKGLEWVASIYSSSGSTSYADSVKGRFTISADTSKNTAYLQMNSLRAEDTAVYYCARGAIDYWGQGTLVTVSSASTKGPSVFPLAPSSKSTSGGTAALGCLVKDYFPEPVTVSWNSGALTSGVHTFPAVLQSSGLYSLSSVVTVPSSSLGTQTYICNVNHKPSNTKVDKKVEPKSCDKTHTCPPCPAPEAAGGPSVFLFPPKPKDTLMISRTPEVTCVVVDVSHEDPEVKFNWYVDGVEVHNAKTKPREEQYNSTYRVVSVLTVLHQDWLNGKEYKCKVSNKALGAPIEKTISKAKGQPREPQVYTLPPSREEMTKNQVSLWCLVKGFYPSDIAVEWESNGQPENNYKTTPPVLDSDGSFFLYSKLTVDKSRWQQGNVFSCSVMHEALHNHYTQKSLSLSPGKGGGGSGGGGSGGGGSNPICKGCLSCSKDNGCSRCQQKLFFFLRREGMRQYGECLHSCPSGYYGHRAPDMNRCARCRIENCDSCRSKDACTKCKVGFYLHRGRCFDECPDGFAPLEETMECVEGSGSGHHHHHH

SEQ ID NO: 139 - protein, 579 aa, Artificial Sequence
  Made in Lab - RSPO mimetic molecule
EVQLVESGGGLVQPGGSLRLSCAASGFNISYSYIHWVRQAPGKGLEWVASIYSSSGSTSYADSVKGRFTISADTSKNTAYLQMNSLRAEDTAVYYCARGAIDYWGQGTLVTVSSASTKGPSVFPLAPSSKSTSGGTAALGCLVKDYFPEPVTVSWNSGALTSGVHTFPAVLQSSGLYSLSSVVTVPSSSLGTQTYICNVNHKPSNTKVDKKVEPKSCDKTHTCPPCPAPEAAGGPSVFLFPPKPKDTLMISRTPEVTCVVVDVSHEDPEVKFNWYVDGVEVHNAKTKPREEQYNSTYRVVSVLTVLHQDWLNGKEYKCKVSNKALGAPIEKTISKAKGQPREPQVYTLPPSREEMTKNQVSLSCAVKGFYPSDIAVEWESNGQPENNYKTTPPVLDSDGSFFLVSKLTVDKSRWQQGNVFSCSVMHEALHNHYTQKSLSLSPGKGGGGSGGGGSGGGGSNPICKGCLSCSKDNGCSRCQQKLFFFLRREGMRQYGECLHSCPSGYYGHRAPDMNRCARCRIENCDSCRSKDACTKCKVGFYLHRGRCFDECPDGFAPLEETMECVEGSGSGDYKDDDDK

SEQ ID NO: 140 - protein, 217 aa, Artificial Sequence; identical to SEQ ID NO: 52
  Made in Lab - RSPO mimetic molecule

SEQ ID NO: 141 - protein, 844 aa, Artificial Sequence
  Made in Lab - RSPO mimetic molecule
EVQLVESGGGLVQPGGSLRLSCAASGFTFTSYYISWVRQAPGKGLEWVAEISPYSGSTYYADSVKGRFTISADTSKNTAYLQMNSLRAEDTAVYYCALRARPPIRLHPRGSVMDYWGQGTLVTVSSGSAASGSSGGSSSGADIQMTQSPSSLSASVGDRVTITCRASQDVSTAVAWYQQKPGKAPKLLIYSASFLYSGVPSRFSGSGSGTDFTLTISSLQPEDFATYYCQQSYTTPPTFGQGTKVEIKGGGGSGGGGSGGGGSEVQLVESGGGLVQPGGSLRLSCAASGFNISYYYIHWVRQAPGKGLEWVASIYPSSGYTYYADSVKGRFTISADTSKNTAYLQMNSLRAEDTAVYYCARSSFYWAMDYWGQGTLVTVSSASTKGPSVFPLAPSSKSTSGGTAALGCLVKDYFPEPVTVSWNSGALTSGVHTFPAVLQSSGLYSLSSVVTVPSSSLGTQTYICNVNHKPSNTKVDKKVEPKSCDKTHTCPPCPAPEAAGGPSVFLFPPKPKDTLMISRTPEVTCVVVDVSHEDPEVKFNWYVDGVEVHNAKTKPREEQYNSTYRVVSVLTVLHQDWLNGKEYKCKVSNKALGAPIEKTISKAKGQPREPQVYTLPPSREEMTKNQVSLWCLVKGFYPSDIAVEWESNGQPENNYKTTPPVLDSDGSFFLYSKLTVDKSRWQQGNVFSCSVMHEALHNHYTQKSLSLSPGKGGGGSGGGGSGGGGSNPICKGCLSCSKDNGCSRCQQKLFFFLRREGMRQYGECLHSCPSGYYGHRAPDMNRCARCRIENCDSCRSKDACTKCKVGFYLHRGRCFDECPDGFAPLEETMECVEGSGSGHHHHHH

SEQ ID NO: 142 - protein, 583 aa, Artificial Sequence
  Made in Lab - RSPO mimetic molecule
EVQLVESGGGLVQPGGSLRLSCAASGFNISYYYIHWVRQAPGKGLEWVASIYPSSGYTYYADSVKGRFTISADTSKNTAYLQMNSLRAEDTAVYYCARSSFYWAMDYWGQGTLVTVSSASTKGPSVFPLAPSSKSTSGGTAALGCLVKDYFPEPVTVSWNSGALTSGVHTFPAVLQSSGLYSLSSVVTVPSSSLGTQTYICNVNHKPSNTKVDKKVEPKSCDKTHTCPPCPAPEAAGGPSVFLFPPKPKDTLMISRTPEVTCVVVDVSHEDPEVKFNWYVDGVEVHNAKTKPREEQYNSTYRVVSVLTVLHQDWLNGKEYKCKVSNKALGAPIEKTISKAKGQPREPQVYTLPPSREEMTKNQVSLSCAVKGFYPSDIAVEWESNGQPENNYKTTPPVLDSDGSFFLVSKLTVDKSRWQQGNVFSCSVMHEALHNHYTQKSLSLSPGKGGGGSGGGGSGGGGSNPICKGCLSCSKDNGCSRCQQKLFFFLRREGMRQYGECLHSCPSGYYGHRAPDMNRCARCRIENCDSCRSKDACTKCKVGFYLHRGRCFDECPDGFAPLEETMECVEGSGSGDYKDDDDK

SEQ ID NO: 143 - protein, 215 aa, Artificial Sequence; identical to SEQ ID NO: 70
  Made in Lab - RSPO mimetic molecule

SEQ ID NO: 144 - protein, 845 aa, Artificial Sequence
  Made in Lab - RSPO mimetic molecule
EVQLVESGGGLVQPGGSLRLSCAASGFTFTSYYISWVRQAPGKGLEWVAEISPYSGSTYYADSVKGRFTISADTSKNTAYLQMNSLRAEDTAVYYCALRARPPIRLHPRGSVMDYWGQGTLVTVSSGSAASGSSGGSSSGADIQMTQSPSSLSASVGDRVTITCRASQDVSTAVAWYQQKPGKAPKLLIYSASFLYSGVPSRFSGSGSGTDFTLTISSLQPEDFATYYCQQSYTTPPTFGQGTKVEIKGGGGSGGGGSGGGGSEVQLVESGGGLVQPGGSLRLSCAASGFNLSSYSMHWVRQAPGKGLEWVAYISSYYGYTYYADSVKGRFTISADTSKNTAYLQMNSLRAEDTAVYYCARPAPGHWGFDYWGQGTLVTVSSASTKGPSVFPLAPSSKSTSGGTAALGCLVKDYFPEPVTVSWNSGALTSGVHTFPAVLQSSGLYSLSSVVTVPSSSLGTQTYICNVNHKPSNTKVDKKVEPKSCDKTHTCPPCPAPEAAGGPSVFLFPPKPKDTLMISRTPEVTCVVVDVSHEDPEVKFNWYVDGVEVHNAKTKPREEQYNSTYRVVSVLTVLHQDWLNGKEYKCKVSNKALGAPIEKTISKAKGQPREPQVYTLPPSREEMTKNQVSLWCLVKGFYPSDIAVEWESNGQPENNYKTTPPVLDSDGSFFLYSKLTVDKSRWQQGNVFSCSVMHEALHNHYTQKSLSLSPGKGGGGSGGGGSGGGGSNPICKGCLSCSKDNGCSRCQQKLFFFLRREGMRQYGECLHSCPSGYYGHRAPDMNRCARCRIENCDSCRSKDACTKCKVGFYLHRGRCFDECPDGFAPLEETMECVEGSGSGHHHHHH

SEQ ID NO: 145 - protein, 584 aa, Artificial Sequence
  Made in Lab - RSPO mimetic molecule
EVQLVESGGGLVQPGGSLRLSCAASGFNLSSYSMHWVRQAPGKGLEWVAYISSYYGYTYYADSVKGRFTISADTSKNTAYLQMNSLRAEDTAVYYCARPAPGHWGFDYWGQGTLVTVSSASTKGPSVFPLAPSSKSTSGGTAALGCLVKDYFPEPVTVSWNSGALTSGVHTFPAVLQSSGLYSLSSVVTVPSSSLGTQTYICNVNHKPSNTKVDKKVEPKSCDKTHTCPPCPAPEAAGGPSVFLFPPKPKDTLMISRTPEVTCVVVDVSHEDPEVKFNWYVDGVEVHNAKTKPREEQYNSTYRVVSVLTVLHQDWLNGKEYKCKVSNKALGAPIEKTISKAKGQPREPQVYTLPPSREEMTKNQVSLSCAVKGFYPSDIAVEWESNGQPENNYKTTPPVLDSDGSFFLVSKLTVDKSRWQQGNVFSCSVMHEALHNHYTQKSLSLSPGKGGGGSGGGGSGGGGSNPICKGCLSCSKDNGCSRCQQKLFFFLRREGMRQYGECLHSCPSGYYGHRAPDMNRCARCRIENCDSCRSKDACTKCKVGFYLHRGRCFDECPDGFAPLEETMECVEGSGSGDYKDDDDK

SEQ ID NO: 146 - protein, 214 aa, Artificial Sequence; identical to SEQ ID NO: 72
  Made in Lab - RSPO mimetic molecule

SEQ ID NO: 147 - protein, 845 aa, Artificial Sequence
  Made in Lab - RSPO mimetic molecule
EVQLVESGGGLVQPGGSLRLSCAASGFTFTSYYISWVRQAPGKGLEWVAEISPYSGSTYYADSVKGRFTISADTSKNTAYLQMNSLRAEDTAVYYCALRARPPIRLHPRGSVMDYWGQGTLVTVSSGSAASGSSGGSSSGADIQMTQSPSSLSASVGDRVTITCRASQDVSTAVAWYQQKPGKAPKLLIYSASFLYSGVPSRFSGSGSGTDFTLTISSLQPEDFATYYCQQSYTTPPTFGQGTKVEIKGGGGSGGGGSGGGGSQVQLVQSGAEVKKPGASVKVSCKASGGTFSSYAISWVRQAPGQGLEWMGWINAGNGNTTYAQKFQGRVTMTRDTSTSTVYMELSSLRSEDTAVYYCARHYYGSGSYPDWGQGTLVTVSSASTKGPSVFPLAPSSKSTSGGTAALGCLVKDYFPEPVTVSWNSGALTSGVHTFPAVLQSSGLYSLSSVVTVPSSSLGTQTYICNVNHKPSNTKVDKKVEPKSCDKTHTCPPCPAPEAAGGPSVFLFPPKPKDTLMISRTPEVTCVVVDVSHEDPEVKFNWYVDGVEVHNAKTKPREEQYNSTYRVVSVLTVLHQDWLNGKEYKCKVSNKALGAPIEKTISKAKGQPREPQVYTLPPSREEMTKNQVSLWCLVKGFYPSDIAVEWESNGQPENNYKTTPPVLDSDGSFFLYSKLTVDKSRWQQGNVFSCSVMHEALHNHYTQKSLSLSPGKGGGGSGGGGSGGGGSNPICKGCLSCSKDNGCSRCQQKLFFFLRREGMRQYGECLHSCPSGYYGHRAPDMNRCARCRIENCDSCRSKDACTKCKVGFYLHRGRCFDECPDGFAPLEETMECVEGSGSGHHHHHH

SEQ ID NO: 148 - protein, 584 aa, Artificial Sequence
  Made in Lab - RSPO mimetic molecule
QVQLVQSGAEVKKPGASVKVSCKASGGTFSSYAISWVRQAPGQGLEWMGWINAGNGNTTYAQKFQGRVTMTRDTSTSTVYMELSSLRSEDTAVYYCARHYYGSGSYPDWGQGTLVTVSSASTKGPSVFPLAPSSKSTSGGTAALGCLVKDYFPEPVTVSWNSGALTSGVHTFPAVLQSSGLYSLSSVVTVPSSSLGTQTYICNVNHKPSNTKVDKKVEPKSCDKTHTCPPCPAPEAAGGPSVFLFPPKPKDTLMISRTPEVTCVVVDVSHEDPEVKFNWYVDGVEVHNAKTKPREEQYNSTYRVVSVLTVLHQDWLNGKEYKCKVSNKALGAPIEKTISKAKGQPREPQVYTLPPSREEMTKNQVSLSCAVKGFYPSDIAVEWESNGQPENNYKTTPPVLDSDGSFFLVSKLTVDKSRWQQGNVFSCSVMHEALHNHYTQKSLSLSPGKGGGGSGGGGSGGGGSNPICKGCLSCSKDNGCSRCQQKLFFFLRREGMRQYGECLHSCPSGYYGHRAPDMNRCARCRIENCDSCRSKDACTKCKVGFYLHRGRCFDECPDGFAPLEETMECVEGSGSGDYKDDDDK

SEQ ID NO: 149 - protein, 214 aa, Artificial Sequence; identical to SEQ ID NO: 74
  Made in Lab - RSPO mimetic molecule

SEQ ID NO: 150 - protein, 852 aa, Artificial Sequence
  Made in Lab - RSPO mimetic molecule
EVQLVESGGGLVQPGGSLRLSCAASGFTFTSYYISWVRQAPGKGLEWVAEISPYSGSTYYADSVKGRFTISADTSKNTAYLQMNSLRAEDTAVYYCALRARPPIRLHPRGSVMDYWGQGTLVTVSSGSAASGSSGGSSSGADIQMTQSPSSLSASVGDRVTITCRASQDVSTAVAWYQQKPGKAPKLLIYSASFLYSGVPSRFSGSGSGTDFTLTISSLQPEDFATYYCQQSYTTPPTFGQGTKVEIKGGGGSGGGGSGGGGSEVQLVESGGGLVQPGGSLRLSCAASGFTFSSFNMFWVRQAPGKGLEWVAGIDDDGSYPNYGSAVKGRATISRDNSKNTLYLQMNSLRAEDTAVYYCAKSGYGGSWGGYIADDIDAWGQGTLVTVSSASTKGPSVFPLAPSSKSTSGGTAALGCLVKDYFPEPVTVSWNSGALTSGVHTFPAVLQSSGLYSLSSVVTVPSSSLGTQTYICNVNHKPSNTKVDKKVEPKSCDKTHTCPPCPAPEAAGGPSVFLFPPKPKDTLMISRTPEVTCVVVDVSHEDPEVKFNWYVDGVEVHNAKTKPREEQYNSTYRVVSVLTVLHQDWLNGKEYKCKVSNKALGAPIEKTISKAKGQPREPQVYTLPPSREEMTKNQVSLWCLVKGFYPSDIAVEWESNGQPENNYKTTPPVLDSDGSFFLYSKLTVDKSRWQQGNVFSCSVMHEALHNHYTQKSLSLSPGKGGGGSGGGGSGGGGSNPICKGCLSCSKDNGCSRCQQKLFFFLRREGMRQYGECLHSCPSGYYGHRAPDMNRCARCRIENCDSCRSKDACTKCKVGFYLHRGRCFDECPDGFAPLEETMECVEGSGSGHHHHHH

SEQ ID NO: 151 - protein, 591 aa, Artificial Sequence
  Made in Lab - RSPO mimetic molecule
EVQLVESGGGLVQPGGSLRLSCAASGFTFSSFNMFWVRQAPGKGLEWVAGIDDDGSYPNYGSAVKGRATISRDNSKNTLYLQMNSLRAEDTAVYYCAKSGYGGSWGGYIADDIDAWGQGTLVTVSSASTKGPSVFPLAPSSKSTSGGTAALGCLVKDYFPEPVTVSWNSGALTSGVHTFPAVLQSSGLYSLSSVVTVPSSSLGTQTYICNVNHKPSNTKVDKKVEPKSCDKTHTCPPCPAPEAAGGPSVFLFPPKPKDTLMISRTPEVTCVVVDVSHEDPEVKFNWYVDGVEVHNAKTKPREEQYNSTYRVVSVLTVLHQDWLNGKEYKCKVSNKALGAPIEKTISKAKGQPREPQVYTLPPSREEMTKNQVSLSCAVKGFYPSDIAVEWESNGQPENNYKTTPPVLDSDGSFFLVSKLTVDKSRWQQGNVFSCSVMHEALHNHYTQKSLSLSPGKGGGGSGGGGSGGGGSNPICKGCLSCSKDNGCSRCQQKLFFFLRREGMRQYGECLHSCPSGYYGHRAPDMNRCARCRIENCDSCRSKDACTKCKVGFYLHRGRCFDECPDGFAPLEETMECVEGSGSGDYKDDDDK

SEQ ID NO: 152 - protein, 213 aa, Artificial Sequence; identical to SEQ ID NO: 76
  Made in Lab - RSPO mimetic molecule

SEQ ID NO: 153 - protein, 844 aa, Artificial Sequence; identical to SEQ ID NO: 132
  Made in Lab - RSPO mimetic molecule

SEQ ID NO: 154 - protein, 724 aa, Artificial Sequence
  Made in Lab - RSPO mimetic molecule
EVQLVESGGGLVQPGGSLRLSCAASGFTFTSYYISWVRQAPGKGLEWVAEISPYSGSTYYADSVKGRFTISADTSKNTAYLQMNSLRAEDTAVYYCALRARPPIRLHPRGSVMDYWGQGTLVTVSSGSAASGSSGGSSSGADIQMTQSPSSLSASVGDRVTITCRASQDVSTAVAWYQQKPGKAPKLLIYSASFLYSGVPSRFSGSGSGTDFTLTISSLQPEDFATYYCQQSYTTPPTFGQGTKVEIKGGGGSGGGGSGGGGSEVQLVESGGGLVQPGGSLRLSCAASGFTFSHYTLSWVRQAPGKGLEWVSVISGDGSYTYYADSVKGRFTISSDNSKNTLYLQMNSLRAEDTAVYYCARNFIKYVFANWGQGTLVTVSSASTKGPSVFPLAPSSKSTSGGTAALGCLVKDYFPEPVTVSWNSGALTSGVHTFPAVLQSSGLYSLSSVVTVPSSSLGTQTYICNVNHKPSNTKVDKKVEPKSCDKTHTCPPCPAPEAAGGPSVFLFPPKPKDTLMISRTPEVTCVVVDVSHEDPEVKFNWYVDGVEVHNAKTKPREEQYNSTYRVVSVLTVLHQDWLNGKEYKCKVSNKALGAPIEKTISKAKGQPREPQVYTLPPSREEMTKNQVSLSCAVKGFYPSDIAVEWESNGQPENNYKTTPPVLDSDGSFFLVSKLTVDKSRWQQGNVFSCSVMHEALHNHYTQKSLSLSPGKGSGSGDYKDDDDK

SEQ ID NO: 155 - protein, 213 aa, Artificial Sequence; identical to SEQ ID NO: 22
  Made in Lab - RSPO mimetic molecule

SEQ ID NO: 156 - protein, 843 aa, Artificial Sequence; identical to SEQ ID NO: 135
  Made in Lab - RSPO mimetic molecule

SEQ ID NO: 157 - protein, 723 aa, Artificial Sequence
  Made in Lab - RSPO mimetic molecule
EVQLVESGGGLVQPGGSLRLSCAASGFTFTSYYISWVRQAPGKGLEWVAEISPYSGSTYYADSVKGRFTISADTSKNTAYLQMNSLRAEDTAVYYCALRARPPIRLHPRGSVMDYWGQGTLVTVSSGSAASGSSGGSSSGADIQMTQSPSSLSASVGDRVTITCRASQDVSTAVAWYQQKPGKAPKLLIYSASFLYSGVPSRFSGSGSGTDFTLTISSLQPEDFATYYCQQSYTTPPTFGQGTKVEIKGGGGSGGGGSGGGGSEVQLVESGGGLVQPGGSLRLSCAASGFNISSSYIHWVRQAPGKGLEWVAYIYSSYGSTYYADSVKGRFTISADTSKNTAYLQMNSLRAEDTAVYYCARASWYALDYWGQGTLVTVSSASTKGPSVFPLAPSSKSTSGGTAALGCLVKDYFPEPVTVSWNSGALTSGVHTFPAVLQSSGLYSLSSVVTVPSSSLGTQTYICNVNHKPSNTKVDKKVEPKSCDKTHTCPPCPAPEAAGGPSVFLFPPKPKDTLMISRTPEVTCVVVDVSHEDPEVKFNWYVDGVEVHNAKTKPREEQYNSTYRVVSVLTVLHQDWLNGKEYKCKVSNKALGAPIEKTISKAKGQPREPQVYTLPPSREEMTKNQVSLSCAVKGFYPSDIAVEWESNGQPENNYKTTPPVLDSDGSFFLVSKLTVDKSRWQQGNVFSCSVMHEALHNHYTQKSLSLSPGKGSGSGDYKDDDDK

SEQ ID NO: 158 - protein, 216 aa, Artificial Sequence; identical to SEQ ID NO: 49
  Made in Lab - RSPO mimetic molecule

SEQ ID NO: 159 - protein, 840 aa, Artificial Sequence; identical to SEQ ID NO: 138
  Made in Lab - RSPO mimetic molecule

SEQ ID NO: 160 - protein, 720 aa, Artificial Sequence
  Made in Lab - RSPO mimetic molecule
EVQLVESGGGLVQPGGSLRLSCAASGFTFTSYYISWVRQAPGKGLEWVAEISPYSGSTYYADSVKGRFTISADTSKNTAYLQMNSLRAEDTAVYYCALRARPPIRLHPRGSVMDYWGQGTLVTVSSGSAASGSSGGSSSGADIQMTQSPSSLSASVGDRVTITCRASQDVSTAVAWYQQKPGKAPKLLIYSASFLYSGVPSRFSGSGSGTDFTLTISSLQPEDFATYYCQQSYTTPPTFGQGTKVEIKGGGGSGGGGSGGGGSEVQLVESGGGLVQPGGSLRLSCAASGFNISYSYIHWVRQAPGKGLEWVASIYSSSGSTSYADSVKGRFTISADTSKNTAYLQMNSLRAEDTAVYYCARGAIDYWGQGTLVTVSSASTKGPSVFPLAPSSKSTSGGTAALGCLVKDYFPEPVTVSWNSGALTSGVHTFPAVLQSSGLYSLSSVVTVPSSSLGTQTYICNVNHKPSNTKVDKKVEPKSCDKTHTCPPCPAPEAAGGPSVFLFPPKPKDTLMISRTPEVTCVVVDVSHEDPEVKFNWYVDGVEVHNAKTKPREEQYNSTYRVVSVLTVLHQDWLNGKEYKCKVSNKALGAPIEKTISKAKGQPREPQVYTLPPSREEMTKNQVSLSCAVKGFYPSDIAVEWESNGQPENNYKTTPPVLDSDGSFFLVSKLTVDKSRWQQGNVFSCSVMHEALHNHYTQKSLSLSPGKGSGSGDYKDDDDK

SEQ ID NO: 161 - protein, 217 aa, Artificial Sequence; identical to SEQ ID NO: 52
  Made in Lab - RSPO mimetic molecule

SEQ ID NO: 162 - protein, 844 aa, Artificial Sequence; identical to SEQ ID NO: 141
  Made in Lab - RSPO mimetic molecule

SEQ ID NO: 163 - protein, 724 aa, Artificial Sequence
  Made in Lab - RSPO mimetic molecule
EVQLVESGGGLVQPGGSLRLSCAASGFTFTSYYISWVRQAPGKGLEWVAEISPYSGSTYYADSVKGRFTISADTSKNTAYLQMNSLRAEDTAVYYCALRARPPIRLHPRGSVMDYWGQGTLVTVSSGSAASGSSGGSSSGADIQMTQSPSSLSASVGDRVTITCRASQDVSTAVAWYQQKPGKAPKLLIYSASFLYSGVPSRFSGSGSGTDFTLTISSLQPEDFATYYCQQSYTTPPTFGQGTKVEIKGGGGSGGGGSGGGGSEVQLVESGGGLVQPGGSLRLSCAASGFNISYYYIHWVRQAPGKGLEWVASIYPSSGYTYYADSVKGRFTISADTSKNTAYLQMNSLRAEDTAVYYCARSSFYWAMDYWGQGTLVTVSSASTKGPSVFPLAPSSKSTSGGTAALGCLVKDYFPEPVTVSWNSGALTSGVHTFPAVLQSSGLYSLSSVVTVPSSSLGTQTYICNVNHKPSNTKVDKKVEPKSCDKTHTCPPCPAPEAAGGPSVFLFPPKPKDTLMISRTPEVTCVVVDVSHEDPEVKFNWYVDGVEVHNAKTKPREEQYNSTYRVVSVLTVLHQDWLNGKEYKCKVSNKALGAPIEKTISKAKGQPREPQVYTLPPSREEMTKNQVSLSCAVKGFYPSDIAVEWESNGQPENNYKTTPPVLDSDGSFFLVSKLTVDKSRWQQGNVFSCSVMHEALHNHYTQKSLSLSPGKGSGSGDYKDDDDK

SEQ ID NO: 164 - protein, 215 aa, Artificial Sequence; identical to SEQ ID NO: 70
  Made in Lab - RSPO mimetic molecule

SEQ ID NO: 165 - protein, 845 aa, Artificial Sequence; identical to SEQ ID NO: 144
  Made in Lab - RSPO mimetic molecule

SEQ ID NO: 166 - protein, 725 aa, Artificial Sequence
  Made in Lab - RSPO mimetic molecule
EVQLVESGGGLVQPGGSLRLSCAASGFTFTSYYISWVRQAPGKGLEWVAEISPYSGSTYYADSVKGRFTISADTSKNTAYLQMNSLRAEDTAVYYCALRARPPIRLHPRGSVMDYWGQGTLVTVSSGSAASGSSGGSSSGADIQMTQSPSSLSASVGDRVTITCRASQDVSTAVAWYQQKPGKAPKLLIYSASFLYSGVPSRFSGSGSGTDFTLTISSLQPEDFATYYCQQSYTTPPTFGQGTKVEIKGGGGSGGGGSGGGGSEVQLVESGGGLVQPGGSLRLSCAASGFNLSSYSMHWVRQAPGKGLEWVAYISSYYGYTYYADSVKGRFTISADTSKNTAYLQMNSLRAEDTAVYYCARPAPGHWGFDYWGQGTLVTVSSASTKGPSVFPLAPSSKSTSGGTAALGCLVKDYFPEPVTVSWNSGALTSGVHTFPAVLQSSGLYSLSSVVTVPSSSLGTQTYICNVNHKPSNTKVDKKVEPKSCDKTHTCPPCPAPEAAGGPSVFLFPPKPKDTLMISRTPEVTCVVVDVSHEDPEVKFNWYVDGVEVHNAKTKPREEQYNSTYRVVSVLTVLHQDWLNGKEYKCKVSNKALGAPIEKTISKAKGQPREPQVYTLPPSREEMTKNQVSLSCAVKGFYPSDIAVEWESNGQPENNYKTTPPVLDSDGSFFLVSKLTVDKSRWQQGNVFSCSVMHEALHNHYTQKSLSLSPGKGSGSGDYKDDDDK

SEQ ID NO: 167 - protein, 214 aa, Artificial Sequence; identical to SEQ ID NO: 72
  Made in Lab - RSPO mimetic molecule

SEQ ID NO: 168 - protein, 845 aa, Artificial Sequence; identical to SEQ ID NO: 147
  Made in Lab - RSPO mimetic molecule

SEQ ID NO: 169 - protein, 725 aa, Artificial Sequence
  Made in Lab - RSPO mimetic molecule
EVQLVESGGGLVQPGGSLRLSCAASGFTFTSYYISWVRQAPGKGLEWVAEISPYSGSTYYADSVKGRFTISADTSKNTAYLQMNSLRAEDTAVYYCALRARPPIRLHPRGSVMDYWGQGTLVTVSSGSAASGSSGGSSSGADIQMTQSPSSLSASVGDRVTITCRASQDVSTAVAWYQQKPGKAPKLLIYSASFLYSGVPSRFSGSGSGTDFTLTISSLQPEDFATYYCQQSYTTPPTFGQGTKVEIKGGGGSGGGGSGGGGSQVQLVQSGAEVKKPGASVKVSCKASGGTFSSYAISWVRQAPGQGLEWMGWINAGNGNTTYAQKFQGRVTMTRDTSTSTVYMELSSLRSEDTAVYYCARHYYGSGSYPDWGQGTLVTVSSASTKGPSVFPLAPSSKSTSGGTAALGCLVKDYFPEPVTVSWNSGALTSGVHTFPAVLQSSGLYSLSSVVTVPSSSLGTQTYICNVNHKPSNTKVDKKVEPKSCDKTHTCPPCPAPEAAGGPSVFLFPPKPKDTLMISRTPEVTCVVVDVSHEDPEVKFNWYVDGVEVHNAKTKPREEQYNSTYRVVSVLTVLHQDWLNGKEYKCKVSNKALGAPIEKTISKAKGQPREPQVYTLPPSREEMTKNQVSLSCAVKGFYPSDIAVEWESNGQPENNYKTTPPVLDSDGSFFLVSKLTVDKSRWQQGNVFSCSVMHEALHNHYTQKSLSLSPGKGSGSGDYKDDDDK

SEQ ID NO: 170 - protein, 214 aa, Artificial Sequence; identical to SEQ ID NO: 74
  Made in Lab - RSPO mimetic molecule

SEQ ID NO: 171 - protein, 852 aa, Artificial Sequence; identical to SEQ ID NO: 150
  Made in Lab - RSPO mimetic molecule

SEQ ID NO: 172 - protein, 732 aa, Artificial Sequence
  Made in Lab - RSPO mimetic molecule
EVQLVESGGGLVQPGGSLRLSCAASGFTFTSYYISWVRQAPGKGLEWVAEISPYSGSTYYADSVKGRFTISADTSKNTAYLQMNSLRAEDTAVYYCALRARPPIRLHPRGSVMDYWGQGTLVTVSSGSAASGSSGGSSSGADIQMTQSPSSLSASVGDRVTITCRASQDVSTAVAWYQQKPGKAPKLLIYSASFLYSGVPSRFSGSGSGTDFTLTISSLQPEDFATYYCQQSYTTPPTFGQGTKVEIKGGGGSGGGGSGGGGSEVQLVESGGGLVQPGGSLRLSCAASGFTFSSFNMFWVRQAPGKGLEWVAGIDDDGSYPNYGSAVKGRATISRDNSKNTLYLQMNSLRAEDTAVYYCAKSGYGGSWGGYIADDIDAWGQGTLVTVSSASTKGPSVFPLAPSSKSTSGGTAALGCLVKDYFPEPVTVSWNSGALTSGVHTFPAVLQSSGLYSLSSVVTVPSSSLGTQTYICNVNHKPSNTKVDKKVEPKSCDKTHTCPPCPAPEAAGGPSVFLFPPKPKDTLMISRTPEVTCVVVDVSHEDPEVKFNWYVDGVEVHNAKTKPREEQYNSTYRVVSVLTVLHQDWLNGKEYKCKVSNKALGAPIEKTISKAKGQPREPQVYTLPPSREEMTKNQVSLSCAVKGFYPSDIAVEWESNGQPENNYKTTPPVLDSDGSFFLVSKLTVDKSRWQQGNVFSCSVMHEALHNHYTQKSLSLSPGKGSGSGDYKDDDDK

SEQ ID NO: 173 - protein, 213 aa, Artificial Sequence; identical to SEQ ID NO: 76
  Made in Lab - RSPO mimetic molecule

SEQ ID NO: 174 - protein, 844 aa, Artificial Sequence; identical to SEQ ID NO: 132
  Made in Lab - RSPO mimetic molecule

SEQ ID NO: 175 - protein, 461 aa, Artificial Sequence; identical to SEQ ID NO: 78
  Made in Lab - RSPO mimetic molecule

SEQ ID NO: 176 - protein, 213 aa, Artificial Sequence; identical to SEQ ID NO: 22
  Made in Lab - RSPO mimetic molecule

SEQ ID NO: 177 - protein, 844 aa, Artificial Sequence; identical to SEQ ID NO: 141
  Made in Lab - RSPO mimetic molecule

SEQ ID NO: 178 - protein, 461 aa, Artificial Sequence; identical to SEQ ID NO: 87
  Made in Lab - RSPO mimetic molecule

SEQ ID NO: 179 - protein, 215 aa, Artificial Sequence; identical to SEQ ID NO: 70
  Made in Lab - RSPO mimetic molecule

SEQ ID NO: 180 - protein, 845 aa, Artificial Sequence; identical to SEQ ID NO: 144
  Made in Lab - RSPO mimetic molecule

SEQ ID NO: 181 - protein, 462 aa, Artificial Sequence; identical to SEQ ID NO: 90
  Made in Lab - RSPO mimetic molecule

SEQ ID NO: 182 - protein, 214 aa, Artificial Sequence; identical to SEQ ID NO: 72
  Made in Lab - RSPO mimetic molecule

SEQ ID NO: 183 - protein, 845 aa, Artificial Sequence; identical to SEQ ID NO: 147
  Made in Lab - RSPO mimetic molecule

SEQ ID NO: 184 - protein, 462 aa, Artificial Sequence; identical to SEQ ID NO: 93
  Made in Lab - RSPO mimetic molecule

SEQ ID NO: 185 - protein, 214 aa, Artificial Sequence; identical to SEQ ID NO: 74
  Made in Lab - RSPO mimetic molecule

SEQ ID NO: 186 - protein, 852 aa, Artificial Sequence; identical to SEQ ID NO: 150
  Made in Lab - RSPO mimetic molecule

SEQ ID NO: 187 - protein, 469 aa, Artificial Sequence; identical to SEQ ID NO: 96
  Made in Lab - RSPO mimetic molecule

SEQ ID NO: 188 - protein, 213 aa, Artificial Sequence; identical to SEQ ID NO: 76
  Made in Lab - RSPO mimetic molecule

SEQ ID NO: 189 - protein, 713 aa, Artificial Sequence
  Made in Lab - WNT surrogate molecule
EVQLVESGGGLVQPGGSLRLSCAASGFTFTSYYISWVRQAPGKGLEWVAEISPYSGSTYYADSVKGRFTISADTSKNTAYLQMNSLRAEDTAVYYCALRARPPIRLHPRGSVMDYWGQGTLVTVSSGSAASGSSGGSSSGADIQMTQSPSSLSASVGDRVTITCRASQDVSTAVAWYQQKPGKAPKLLIYSASFLYSGVPSRFSGSGSGTDFTLTISSLQPEDFATYYCQQSYTTPPTFGQGTKVEIKGGGGSGGGGSGGGGSEVQLVESGGGLVQPGGSLRLSCAASGFNFSSSSIHWVRQAPGKGLEWVAYIYPSYDYTYYADSVKGRFTISADTSKNTAYLQMNSLRAEDTAVYYCARGYFYTWGGMDYWGQGTLVTVSSASTKGPSVFPLAPSSKSTSGGTAALGCLVKDYFPEPVTVSWNSGALTSGVHTFPAVLQSSGLYSLSSVVTVPSSSLGTQTYICNVNHKPSNTKVDKKVEPKSCDKTHTCPPCPAPEAAGGPSVFLFPPKPKDTLMISRTPEVTCVVVDVSHEDPEVKFNWYVDGVEVHNAKTKPREEQYNSTYRVVSVLTVLHQDWLNGKEYKCKVSNKALGAPIEKTISKAKGQPREPQVYTLPPSREEMTKNQVSLTCLVKGFYPSDIAVEWESNGQPENNYKTTPPVLDSDGSFFLYSKLTVDKSRWQQGNVFSCSVMHEALHNHYTQKSLSLSPGK

SEQ ID NO: 190 - protein, 213 aa, Artificial Sequence
  Made in Lab - WNT surrogate molecule
DIQMTQSPSSLSASVGDRVTITCRASQSVSSAVAWYQQKPGKAPKLLIYSASSLYSGVPSRFSGSRSGTDFTLTISSLQPEDFATYYCQQYYSLFTFGQGTKVEIKRTVAAPSVFIFPPSDEQLKSGTASVVCLLNNFYPREAKVQWKVDNALQSGNSQESVTEQDSKDSTYSLSSTLTLSKADYEKHKVYACEVTHQGLSSPVTKSFNRGEC

SEQ ID NO: 191 - protein, 713 aa, Artificial Sequence
  Made in Lab - WNT surrogate molecule
EVQLVESGGGLVQPGGSLRLSCAASGFTFTSYYISWVRQAPGKGLEWVAEISPYSGSTYYADSVKGRFTISADTSKNTAYLQMNSLRAEDTAVYYCALRARPPIRLHPRGSVMDYWGQGTLVTVSSGSAASGSSGGSSSGADIQMTQSPSSLSASVGDRVTITCRASQDVSTAVAWYQQKPGKAPKLLIYSASFLYSGVPSRFSGSGSGTDFTLTISSLQPEDFATYYCQQSYTTPPTFGQGTKVEIKGGGGSGGGGSGGGGSEVQLVESGGGLVQPGGSLRLSCAASGFNIHSSSIHWVRQAPGKGLEWVAATYSSFGSITYADSVKGRFTISADTSKNTAYLQMNSLRAEDTAVYYCARYHHPFGYALDYWGQGTLVTVSSASTKGPSVFPLAPSSKSTSGGTAALGCLVKDYFPEPVTVSWNSGALTSGVHTFPAVLQSSGLYSLSSVVTVPSSSLGTQTYICNVNHKPSNTKVDKKVEPKSCDKTHTCPPCPAPEAAGGPSVFLFPPKPKDTLMISRTPEVTCVVVDVSHEDPEVKFNWYVDGVEVHNAKTKPREEQYNSTYRVVSVLTVLHQDWLNGKEYKCKVSNKALGAPIEKTISKAKGQPREPQVYTLPPSREEMTKNQVSLTCLVKGFYPSDIAVEWESNGQPENNYKTTPPVLDSDGSFFLYSKLTVDKSRWQQGNVFSCSVMHEALHNHYTQKSLSLSPGK

SEQ ID NO: 192 - protein, 213 aa, Artificial Sequence
  Made in Lab - WNT surrogate molecule
DIQMTQSPSSLSASVGDRVTITCRASQSVSSAVAWYQQKPGKAPKLLIYSASSLYSGVPSRFSGSRSGTDFTLTISSLQPEDFATYYCQQGVYLFTFGQGTKVEIKRTVAAPSVFIFPPSDEQLKSGTASVVCLLNNFYPREAKVQWKVDNALQSGNSQESVTEQDSKDSTYSLSSTLTLSKADYEKHKVYACEVTHQGLSSPVTKSFNRGEC

SEQ ID NO: 193 - protein, 724 aa, Artificial Sequence
  Made in Lab - WNT surrogate molecule
EVQLVESGGGLVQPGGSLRLSCAASGFTFTSYYISWVRQAPGKGLEWVAEISPYSGSTYYADSVKGRFTISADTSKNTAYLQMNSLRAEDTAVYYCALRARPPIRLHPRGSVMDYWGQGTLVTVSSGSAASGSSGGSSSGADIQMTQSPSSLSASVGDRVTITCRASQDVSTAVAWYQQKPGKAPKLLIYSASFLYSGVPSRFSGSGSGTDFTLTISSLQPEDFATYYCQQSYTTPPTFGQGTKVEIKGGGGSGGGGSGGGGSEVQLVESGGGLVQPGGSLRLSCAASGFNFSSSSIHWVRQAPGKGLEWVAYIYPSYDYTYYADSVKGRFTISADTSKNTAYLQMNSLRAEDTAVYYCARGYFYTWGGMDYWGQGTLVTVSSASTKGPSVFPLAPSSKSTSGGTAALGCLVKDYFPEPVTVSWNSGALTSGVHTFPAVLQSSGLYSLSSVVTVPSSSLGTQTYICNVNHKPSNTKVDKKVEPKSCDKTHTCPPCPAPEAAGGPSVFLFPPKPKDTLMISRTPEVTCVVVDVSHEDPEVKFNWYVDGVEVHNAKTKPREEQYNSTYRVVSVLTVLHQDWLNGKEYKCKVSNKALGAPIEKTISKAKGQPREPQVYTLPPSREEMTKNQVSLWCLVKGFYPSDIAVEWESNGQPENNYKTTPPVLDSDGSFFLYSKLTVDKSRWQQGNVFSCSVMHEALHNHYTQKSLSLSPGKGSGSGHHHHHH

SEQ ID NO: 194 - protein, 463 aa, Artificial Sequence
  Made in Lab - WNT surrogate molecule
EVQLVESGGGLVQPGGSLRLSCAASGFNFSSSSIHWVRQAPGKGLEWVAYIYPSYDYTYYADSVKGRFTISADTSKNTAYLQMNSLRAEDTAVYYCARGYFYTWGGMDYWGQGTLVTVSSASTKGPSVFPLAPSSKSTSGGTAALGCLVKDYFPEPVTVSWNSGALTSGVHTFPAVLQSSGLYSLSSVVTVPSSSLGTQTYICNVNHKPSNTKVDKKVEPKSCDKTHTCPPCPAPEAAGGPSVFLFPPKPKDTLMISRTPEVTCVVVDVSHEDPEVKFNWYVDGVEVHNAKTKPREEQYNSTYRVVSVLTVLHQDWLNGKEYKCKVSNKALGAPIEKTISKAKGQPREPQVYTLPPSREEMTKNQVSLSCAVKGFYPSDIAVEWESNGQPENNYKTTPPVLDSDGSFFLVSKLTVDKSRWQQGNVFSCSVMHEALHNHYTQKSLSLSPGKGSGSGDYKDDDDK

SEQ ID NO: 195 - protein, 213 aa, Artificial Sequence; identical to SEQ ID NO: 190
  Made in Lab - WNT surrogate molecule

SEQ ID NO: 196 - protein, 724 aa, Artificial Sequence
  Made in Lab - WNT surrogate molecule
EVQLVESGGGLVQPGGSLRLSCAASGFTFTSYYISWVRQAPGKGLEWVAEISPYSGSTYYADSVKGRFTISADTSKNTAYLQMNSLRAEDTAVYYCALRARPPIRLHPRGSVMDYWGQGTLVTVSSGSAASGSSGGSSSGADIQMTQSPSSLSASVGDRVTITCRASQDVSTAVAWYQQKPGKAPKLLIYSASFLYSGVPSRFSGSGSGTDFTLTISSLQPEDFATYYCQQSYTTPPTFGQGTKVEIKGGGGSGGGGSGGGGSEVQLVESGGGLVQPGGSLRLSCAASGFNIHSSSIHWVRQAPGKGLEWVAATYSSFGSITYADSVKGRFTISADTSKNTAYLQMNSLRAEDTAVYYCARYHHPFGYALDYWGQGTLVTVSSASTKGPSVFPLAPSSKSTSGGTAALGCLVKDYFPEPVTVSWNSGALTSGVHTFPAVLQSSGLYSLSSVVTVPSSSLGTQTYICNVNHKPSNTKVDKKVEPKSCDKTHTCPPCPAPEAAGGPSVFLFPPKPKDTLMISRTPEVTCVVVDVSHEDPEVKFNWYVDGVEVHNAKTKPREEQYNSTYRVVSVLTVLHQDWLNGKEYKCKVSNKALGAPIEKTISKAKGQPREPQVYTLPPSREEMTKNQVSLWCLVKGFYPSDIAVEWESNGQPENNYKTTPPVLDSDGSFFLYSKLTVDKSRWQQGNVFSCSVMHEALHNHYTQKSLSLSPGKGSGSGHHHHHH

SEQ ID NO: 197 - protein, 463 aa, Artificial Sequence
  Made in Lab - WNT surrogate molecule
EVQLVESGGGLVQPGGSLRLSCAASGFNIHSSSIHWVRQAPGKGLEWVAATYSSFGSITYADSVKGRFTISADTSKNTAYLQMNSLRAEDTAVYYCARYHHPFGYALDYWGQGTLVTVSSASTKGPSVFPLAPSSKSTSGGTAALGCLVKDYFPEPVTVSWNSGALTSGVHTFPAVLQSSGLYSLSSVVTVPSSSLGTQTYICNVNHKPSNTKVDKKVEPKSCDKTHTCPPCPAPEAAGGPSVFLFPPKPKDTLMISRTPEVTCVVVDVSHEDPEVKFNWYVDGVEVHNAKTKPREEQYNSTYRVVSVLTVLHQDWLNGKEYKCKVSNKALGAPIEKTISKAKGQPREPQVYTLPPSREEMTKNQVSLSCAVKGFYPSDIAVEWESNGQPENNYKTTPPVLDSDGSFFLVSKLTVDKSRWQQGNVFSCSVMHEALHNHYTQKSLSLSPGKGSGSGDYKDDDDK

SEQ ID NO: 198 - protein, 213 aa, Artificial Sequence; identical to SEQ ID NO: 192
  Made in Lab - WNT surrogate molecule

SEQ ID NO: 199 - protein, 843 aa, Artificial Sequence; identical to SEQ ID NO: 135
  Made in Lab - RSPO mimetic molecule

SEQ ID NO: 200 - protein, 460 aa, Artificial Sequence; identical to SEQ ID NO: 81
  Made in Lab - RSPO mimetic molecule

SEQ ID NO: 201 - protein, 216 aa, Artificial Sequence; identical to SEQ ID NO: 49
  Made in Lab - RSPO mimetic molecule

SEQ ID NO: 202 - protein, 840 aa, Artificial Sequence; identical to SEQ ID NO: 138
  Made in Lab - RSPO mimetic molecule

SEQ ID NO: 203 - protein, 457 aa, Artificial Sequence; identical to SEQ ID NO: 84
  Made in Lab - RSPO mimetic molecule

SEQ ID NO: 204 - protein, 217 aa, Artificial Sequence; identical to SEQ ID NO: 52
  Made in Lab - RSPO mimetic molecule

SEQ ID NO: 205 - protein, 714 aa, Artificial Sequence
  Made in Lab - RSPO mimetic molecule
EVQLVESGGGLVQPGGSLRLSCAASGFTFTSYYISWVRQAPGKGLEWVAEISPYSGSTYYADSVKGRFTISADTSKNTAYLQMNSLRAEDTAVYYCALRARPPIRLHPRGSVMDYWGQGTLVTVSSGSAASGSSGGSSSGADIQMTQSPSSLSASVGDRVTITCRASQDVSTAVAWYQQKPGKAPKLLIYSASFLYSGVPSRFSGSGSGTDFTLTISSLQPEDFATYYCQQSYTTPPTFGQGTKVEIKGGGGSGGGGSGGGGASTKGPSVFPLAPSSKSTSGGTAALGCLVKDYFPEPVTVSWNSGALTSGVHTFPAVLQSSGLYSLSSVVTVPSSSLGTQTYICNVNHKPSNTKVDKKVEPKSCDKTHTCPPCPAPEAAGGPSVFLFPPKPKDTLMISRTPEVTCVVVDVSHEDPEVKFNWYVDGVEVHNAKTKPREEQYNSTYRVVSVLTVLHQDWLNGKEYKCKVSNKALGAPIEKTISKAKGQPREPQVYTLPPSREEMTKNQVSLTCLVKGFYPSDIAVEWESNGQPENNYKTTPPVLDSDGSFFLYSKLTVDKSRWQQGNVFSCSVMHEALHNHYTQKSLSLSPGKGGGGSGSGGSGGGGSNPICKGCLSCSKDNGCSRCQQKLFFFLRREGMRQYGECLHSCPSGYYGHRAPDMNRCARCRIENCDSCRSKDACTKCKVGFYLHRGRCFDECPDGFAPLEETMECVE

SEQ ID NO: 206 - protein, 213 aa, Artificial Sequence; identical to SEQ ID NO: 190
  Made in Lab - RSPO mimetic molecule

SEQ ID NO: 207 - protein, 835 aa, Artificial Sequence
  Made in Lab - RSPO mimetic molecule
EVQLVESGGGLVQPGGSLRLSCAASGFTFTSYYISWVRQAPGKGLEWVAEISPYSGSTYYADSVKGRFTISADTSKNTAYLQMNSLRAEDTAVYYCALRARPPIRLHPRGSVMDYWGQGTLVTVSSGSAASGSSGGSSSGADIQMTQSPSSLSASVGDRVTITCRASQDVSTAVAWYQQKPGKAPKLLIYSASFLYSGVPSRFSGSGSGTDFTLTISSLQPEDFATYYCQQSYTTPPTFGQGTKVEIKGGGGSGGGGSGGGGSEVQLVESGGGLVQPGGSLRLSCAASGFNIHSSSIHWVRQAPGKGLEWVAATYSSFGSITYADSVKGRFTISADTSKNTAYLQMNSLRAEDTAVYYCARYHHPFGYALDYWGQGTLVTVSSASTKGPSVFPLAPSSKSTSGGTAALGCLVKDYFPEPVTVSWNSGALTSGVHTFPAVLQSSGLYSLSSVVTVPSSSLGTQTYICNVNHKPSNTKVDKKVEPKSCDKTHTCPPCPAPEAAGGPSVFLFPPKPKDTLMISRTPEVTCVVVDVSHEDPEVKFNWYVDGVEVHNAKTKPREEQYNSTYRVVSVLTVLHQDWLNGKEYKCKVSNKALGAPIEKTISKAKGQPREPQVYTLPPSREEMTKNQVSLTCLVKGFYPSDIAVEWESNGQPENNYKTTPPVLDSDGSFFLYSKLTVDKSRWQQGNVFSCSVMHEALHNHYTQKSLSLSPGKGGGGSGSGGSGGGGSNPICKGCLSCSKDNGCSRCQQKLFFFLRREGMRQYGECLHSCPSGYYGHRAPDMNRCARCRIENCDSCRSKDACTKCKVGFYLHRGRCFDECPDGFAPLEETMECVE

SEQ ID NO: 208 - protein, 213 aa, Artificial Sequence; identical to SEQ ID NO: 192
  Made in Lab - RSPO mimetic molecule

SEQ ID NO: 209 - protein, 846 aa, Artificial Sequence
  Made in Lab - RSPO mimetic molecule
EVQLVESGGGLVQPGGSLRLSCAASGFTFTSYYISWVRQAPGKGLEWVAEISPYSGSTYYADSVKGRFTISADTSKNTAYLQMNSLRAEDTAVYYCALRARPPIRLHPRGSVMDYWGQGTLVTVSSGSAASGSSGGSSSGADIQMTQSPSSLSASVGDRVTITCRASQDVSTAVAWYQQKPGKAPKLLIYSASFLYSGVPSRFSGSGSGTDFTLTISSLQPEDFATYYCQQSYTTPPTFGQGTKVEIKGGGGSGGGGSGGGGSEVQLVESGGGLVQPGGSLRLSCAASGFNFSSSSIHWVRQAPGKGLEWVAYIYPSYDYTYYADSVKGRFTISADTSKNTAYLQMNSLRAEDTAVYYCARGYFYTWGGMDYWGQGTLVTVSSASTKGPSVFPLAPSSKSTSGGTAALGCLVKDYFPEPVTVSWNSGALTSGVHTFPAVLQSSGLYSLSSVVTVPSSSLGTQTYICNVNHKPSNTKVDKKVEPKSCDKTHTCPPCPAPEAAGGPSVFLFPPKPKDTLMISRTPEVTCVVVDVSHEDPEVKFNWYVDGVEVHNAKTKPREEQYNSTYRVVSVLTVLHQDWLNGKEYKCKVSNKALGAPIEKTISKAKGQPREPQVYTLPPSREEMTKNQVSLWCLVKGFYPSDIAVEWESNGQPENNYKTTPPVLDSDGSFFLYSKLTVDKSRWQQGNVFSCSVMHEALHNHYTQKSLSLSPGKGGGGSGGGGSGGGGSNPICKGCLSCSKDNGCSRCQQKLFFFLRREGMRQYGECLHSCPSGYYGHRAPDMNRCARCRIENCDSCRSKDACTKCKVGFYLHRGRCFDECPDGFAPLEETMECVEGSGSGHHHHHH

SEQ ID NO: 210 - protein, 585 aa, Artificial Sequence
  Made in Lab - RSPO mimetic molecule
EVQLVESGGGLVQPGGSLRLSCAASGFNFSSSSIHWVRQAPGKGLEWVAYIYPSYDYTYYADSVKGRFTISADTSKNTAYLQMNSLRAEDTAVYYCARGYFYTWGGMDYWGQGTLVTVSSASTKGPSVFPLAPSSKSTSGGTAALGCLVKDYFPEPVTVSWNSGALTSGVHTFPAVLQSSGLYSLSSVVTVPSSSLGTQTYICNVNHKPSNTKVDKKVEPKSCDKTHTCPPCPAPEAAGGPSVFLFPPKPKDTLMISRTPEVTCVVVDVSHEDPEVKFNWYVDGVEVHNAKTKPREEQYNSTYRVVSVLTVLHQDWLNGKEYKCKVSNKALGAPIEKTISKAKGQPREPQVYTLPPSREEMTKNQVSLSCAVKGFYPSDIAVEWESNGQPENNYKTTPPVLDSDGSFFLVSKLTVDKSRWQQGNVFSCSVMHEALHNHYTQKSLSLSPGKGGGGSGGGGSGGGGSNPICKGCLSCSKDNGCSRCQQKLFFFLRREGMRQYGECLHSCPSGYYGHRAPDMNRCARCRIENCDSCRSKDACTKCKVGFYLHRGRCFDECPDGFAPLEETMECVEGSGSGDYKDDDDK

SEQ ID NO: 211 - protein, 213 aa, Artificial Sequence; identical to SEQ ID NO: 190
  Made in Lab - RSPO mimetic molecule

SEQ ID NO: 212 - protein, 846 aa, Artificial Sequence
  Made in Lab - RSPO mimetic molecule
EVQLVESGGGLVQPGGSLRLSCAASGFTFTSYYISWVRQAPGKGLEWVAEISPYSGSTYYADSVKGRFTISADTSKNTAYLQMNSLRAEDTAVYYCALRARPPIRLHPRGSVMDYWGQGTLVTVSSGSAASGSSGGSSSGADIQMTQSPSSLSASVGDRVTITCRASQDVSTAVAWYQQKPGKAPKLLIYSASFLYSGVPSRFSGSGSGTDFTLTISSLQPEDFATYYCQQSYTTPPTFGQGTKVEIKGGGGSGGGGSGGGGSEVQLVESGGGLVQPGGSLRLSCAASGFNIHSSSIHWVRQAPGKGLEWVAATYSSFGSITYADSVKGRFTISADTSKNTAYLQMNSLRAEDTAVYYCARYHHPFGYALDYWGQGTLVTVSSASTKGPSVFPLAPSSKSTSGGTAALGCLVKDYFPEPVTVSWNSGALTSGVHTFPAVLQSSGLYSLSSVVTVPSSSLGTQTYICNVNHKPSNTKVDKKVEPKSCDKTHTCPPCPAPEAAGGPSVFLFPPKPKDTLMISRTPEVTCVVVDVSHEDPEVKFNWYVDGVEVHNAKTKPREEQYNSTYRVVSVLTVLHQDWLNGKEYKCKVSNKALGAPIEKTISKAKGQPREPQVYTLPPSREEMTKNQVSLWCLVKGFYPSDIAVEWESNGQPENNYKTTPPVLDSDGSFFLYSKLTVDKSRWQQGNVFSCSVMHEALHNHYTQKSLSLSPGKGGGGSGGGGSGGGGSNPICKGCLSCSKDNGCSRCQQKLFFFLRREGMRQYGECLHSCPSGYYGHRAPDMNRCARCRIENCDSCRSKDACTKCKVGFYLHRGRCFDECPDGFAPLEETMECVEGSGSGHHHHHH

SEQ ID NO: 213 - protein, 585 aa, Artificial Sequence
  Made in Lab - RSPO mimetic molecule
EVQLVESGGGLVQPGGSLRLSCAASGFNIHSSSIHWVRQAPGKGLEWVAATYSSFGSITYADSVKGRFTISADTSKNTAYLQMNSLRAEDTAVYYCARYHHPFGYALDYWGQGTLVTVSSASTKGPSVFPLAPSSKSTSGGTAALGCLVKDYFPEPVTVSWNSGALTSGVHTFPAVLQSSGLYSLSSVVTVPSSSLGTQTYICNVNHKPSNTKVDKKVEPKSCDKTHTCPPCPAPEAAGGPSVFLFPPKPKDTLMISRTPEVTCVVVDVSHEDPEVKFNWYVDGVEVHNAKTKPREEQYNSTYRVVSVLTVLHQDWLNGKEYKCKVSNKALGAPIEKTISKAKGQPREPQVYTLPPSREEMTKNQVSLSCAVKGFYPSDIAVEWESNGQPENNYKTTPPVLDSDGSFFLVSKLTVDKSRWQQGNVFSCSVMHEALHNHYTQKSLSLSPGKGGGGSGGGGSGGGGSNPICKGCLSCSKDNGCSRCQQKLFFFLRREGMRQYGECLHSCPSGYYGHRAPDMNRCARCRIENCDSCRSKDACTKCKVGFYLHRGRCFDECPDGFAPLEETMECVEGSGSGDYKDDDDK

SEQ ID NO: 214 - protein, 213 aa, Artificial Sequence; identical to SEQ ID NO: 192
  Made in Lab - RSPO mimetic molecule

SEQ ID NO: 215 - protein, 846 aa, Artificial Sequence; identical to SEQ ID NO: 209
  Made in Lab - RSPO mimetic molecule

SEQ ID NO: 216 - protein, 726 aa, Artificial Sequence
  Made in Lab - RSPO mimetic molecule
EVQLVESGGGLVQPGGSLRLSCAASGFTFTSYYISWVRQAPGKGLEWVAEISPYSGSTYYADSVKGRFTISADTSKNTAYLQMNSLRAEDTAVYYCALRARPPIRLHPRGSVMDYWGQGTLVTVSSGSAASGSSGGSSSGADIQMTQSPSSLSASVGDRVTITCRASQDVSTAVAWYQQKPGKAPKLLIYSASFLYSGVPSRFSGSGSGTDFTLTISSLQPEDFATYYCQQSYTTPPTFGQGTKVEIKGGGGSGGGGSGGGGSEVQLVESGGGLVQPGGSLRLSCAASGFNFSSSSIHWVRQAPGKGLEWVAYIYPSYDYTYYADSVKGRFTISADTSKNTAYLQMNSLRAEDTAVYYCARGYFYTWGGMDYWGQGTLVTVSSASTKGPSVFPLAPSSKSTSGGTAALGCLVKDYFPEPVTVSWNSGALTSGVHTFPAVLQSSGLYSLSSVVTVPSSSLGTQTYICNVNHKPSNTKVDKKVEPKSCDKTHTCPPCPAPEAAGGPSVFLFPPKPKDTLMISRTPEVTCVVVDVSHEDPEVKFNWYVDGVEVHNAKTKPREEQYNSTYRVVSVLTVLHQDWLNGKEYKCKVSNKALGAPIEKTISKAKGQPREPQVYTLPPSREEMTKNQVSLSCAVKGFYPSDIAVEWESNGQPENNYKTTPPVLDSDGSFFLVSKLTVDKSRWQQGNVFSCSVMHEALHNHYTQKSLSLSPGKGSGSGDYKDDDDK

SEQ ID NO: 217 - protein, 213 aa, Artificial Sequence; identical to SEQ ID NO: 190
  Made in Lab - RSPO mimetic molecule

SEQ ID NO: 218 - protein, 845 aa, Artificial Sequence
  Made in Lab - RSPO mimetic molecule
VQLVESGGGLVQPGGSLRLSCAASGFTFTSYYISWVRQAPGKGLEWVAEISPYSGSTYYADSVKGRFTISADTSKNTAYLQMNSLRAEDTAVYYCALRARPPIRLHPRGSVMDYWGQGTLVTVSSGSAASGSSGGSSSGADIQMTQSPSSLSASVGDRVTITCRASQDVSTAVAWYQQKPGKAPKLLIYSASFLYSGVPSRFSGSGSGTDFTLTISSLQPEDFATYYCQQSYTTPPTFGQGTKVEIKGGGGSGGGGSGGGGSEVQLVESGGGLVQPGGSLRLSCAASGFNIHSSSIHWVRQAPGKGLEWVAATYSSFGSITYADSVKGRFTISADTSKNTAYLQMNSLRAEDTAVYYCARYHHPFGYALDYWGQGTLVTVSSASTKGPSVFPLAPSSKSTSGGTAALGCLVKDYFPEPVTVSWNSGALTSGVHTFPAVLQSSGLYSLSSVVTVPSSSLGTQTYICNVNHKPSNTKVDKKVEPKSCDKTHTCPPCPAPEAAGGPSVFLFPPKPKDTLMISRTPEVTCVVVDVSHEDPEVKFNWYVDGVEVHNAKTKPREEQYNSTYRVVSVLTVLHQDWLNGKEYKCKVSNKALGAPIEKTISKAKGQPREPQVYTLPPSREEMTKNQVSLWCLVKGFYPSDIAVEWESNGQPENNYKTTPPVLDSDGSFFLYSKLTVDKSRWQQGNVFSCSVMHEALHNHYTQKSLSLSPGKGGGGSGGGGSGGGGSNPICKGCLSCSKDNGCSRCQQKLFFFLRREGMRQYGECLHSCPSGYYGHRAPDMNRCARCRIENCDSCRSKDACTKCKVGFYLHRGRCFDECPDGFAPLEETMECVEGSGSGHHHHHH

SEQ ID NO: 219 - protein, 726 aa, Artificial Sequence
  Made in Lab - RSPO mimetic molecule
EVQLVESGGGLVQPGGSLRLSCAASGFTFTSYYISWVRQAPGKGLEWVAEISPYSGSTYYADSVKGRFTISADTSKNTAYLQMNSLRAEDTAVYYCALRARPPIRLHPRGSVMDYWGQGTLVTVSSGSAASGSSGGSSSGADIQMTQSPSSLSASVGDRVTITCRASQDVSTAVAWYQQKPGKAPKLLIYSASFLYSGVPSRFSGSGSGTDFTLTISSLQPEDFATYYCQQSYTTPPTFGQGTKVEIKGGGGSGGGGSGGGGSEVQLVESGGGLVQPGGSLRLSCAASGFNIHSSSIHWVRQAPGKGLEWVAATYSSFGSITYADSVKGRFTISADTSKNTAYLQMNSLRAEDTAVYYCARYHHPFGYALDYWGQGTLVTVSSASTKGPSVFPLAPSSKSTSGGTAALGCLVKDYFPEPVTVSWNSGALTSGVHTFPAVLQSSGLYSLSSVVTVPSSSLGTQTYICNVNHKPSNTKVDKKVEPKSCDKTHTCPPCPAPEAAGGPSVFLFPPKPKDTLMISRTPEVTCVVVDVSHEDPEVKFNWYVDGVEVHNAKTKPREEQYNSTYRVVSVLTVLHQDWLNGKEYKCKVSNKALGAPIEKTISKAKGQPREPQVYTLPPSREEMTKNQVSLSCAVKGFYPSDIAVEWESNGQPENNYKTTPPVLDSDGSFFLVSKLTVDKSRWQQGNVFSCSVMHEALHNHYTQKSLSLSPGKGSGSGDYKDDDDK

SEQ ID NO: 220 - protein, 213 aa, Artificial Sequence; identical to SEQ ID NO: 192
  Made in Lab - RSPO mimetic molecule

SEQ ID NO: 221 - protein, 846 aa, Artificial Sequence; identical to SEQ ID NO: 209
  Made in Lab - RSPO mimetic molecule

SEQ ID NO: 222 - protein, 463 aa, Artificial Sequence; identical to SEQ ID NO: 194
  Made in Lab - RSPO mimetic molecule

SEQ ID NO: 223 - protein, 213 aa, Artificial Sequence; identical to SEQ ID NO: 190
  Made in Lab - RSPO mimetic molecule

SEQ ID NO: 224 - protein, 846 aa, Artificial Sequence; identical to SEQ ID NO: 212
  Made in Lab - RSPO mimetic molecule

SEQ ID NO: 225 - protein, 463 aa, Artificial Sequence; identical to SEQ ID NO: 197
  Made in Lab - RSPO mimetic molecule

SEQ ID NO: 226 - protein, 213 aa, Artificial Sequence; identical to SEQ ID NO: 192
  Made in Lab - RSPO mimetic molecule

SEQ ID NO: 227 - protein, 335 aa, Artificial Sequence
  Made in Lab - RSPO mimetic molecule
NPICKGCLSCSKDNGCSRCQQKLFFFLRREGMRQYGECLHSCPSGYYGHRAPDMNRCARCRIENCDSCRSKDACTKCKVGFYLHRGRCFDECPDGFAPLEETMECVEGGGGSGGGGSGGGGSDIELTQPPSVSVAPGQTARISCSGDNIGSFYVHWYQQKPGQAPVLVIYDKSNRPSGIPERFSGSNSGNTATLTISGTQAEDEADYYCQSYANTLSLVFGGGTKLTVLGQPKAAPSVTLFPPSSEELQANKATLVCLISDFYPGAVTVAWKADSSPVKAGVETTTPSKQSNNKYAASSYLSLTPEQWKSHRSYSCQVTHEGSTVEKTVAPTECS

SEQ ID NO: 228 - protein, 711 aa, Artificial Sequence; identical to SEQ ID NO: 63
  Made in Lab - RSPO mimetic molecule

SEQ ID NO: 229 - protein, 338 aa, Artificial Sequence
  Made in Lab - RSPO mimetic molecule
NPICKGCLSCSKDNGCSRCQQKLFFFLRREGMRQYGECLHSCPSGYYGHRAPDMNRCARCRIENCDSCRSKDACTKCKVGFYLHRGRCFDECPDGFAPLEETMECVEGGGGSGGGGSGGGGSDIQMTQSPSSLSASVGDRVTITCRASQSVSSAVAWYQQKPGKAPKLLIYSASSLYSGVPSRFSGSRSGTDFTLTISSLQPEDFATYYCQQYWYGVAPITFGQGTKVEIKRTVAAPSVFIFPPSDEQLKSGTASVVCLLNNFYPREAKVQWKVDNALQSGNSQESVTEQDSKDSTYSLSSTLTLSKADYEKHKVYACEVTHQGLSSPVTKSFNRGEC

SEQ ID NO: 230 - protein, 710 aa, Artificial Sequence; identical to SEQ ID NO: 65
  Made in Lab - RSPO mimetic molecule

SEQ ID NO: 231 - protein, 339 aa, Artificial Sequence
  Made in Lab - RSPO mimetic molecule
NPICKGCLSCSKDNGCSRCQQKLFFFLRREGMRQYGECLHSCPSGYYGHRAPDMNRCARCRIENCDSCRSKDACTKCKVGFYLHRGRCFDECPDGFAPLEETMECVEGGGGSGGGGSGGGGSDIQMTQSPSSLSASVGDRVTITCRASQSVSSAVAWYQQKPGKAPKLLIYSASSLYSGVPSRFSGSRSGTDFTLTISSLQPEDFATYYCQQWYSSGHVLITFGQGTKVEIKRTVAAPSVFIFPPSDEQLKSGTASVVCLLNNFYPREAKVQWKVDNALQSGNSQESVTEQDSKDSTYSLSSTLTLSKADYEKHKVYACEVTHQGLSSPVTKSFNRGEC

SEQ ID NO: 232 - protein, 707 aa, Artificial Sequence; identical to SEQ ID NO: 67
  Made in Lab - RSPO mimetic molecule

SEQ ID NO: 233 - protein, 337 aa, Artificial Sequence
  Made in Lab - RSPO mimetic molecule
NPICKGCLSCSKDNGCSRCQQKLFFFLRREGMRQYGECLHSCPSGYYGHRAPDMNRCARCRIENCDSCRSKDACTKCKVGFYLHRGRCFDECPDGFAPLEETMECVEGGGGSGGGGSGGGGSDIQMTQSPSSLSASVGDRVTITCRASQSVSSAVAWYQQKPGKAPKLLIYSASSLYSGVPSRFSGSRSGTDFTLTISSLQPEDFATYYCQQSYAAYLFTFGQGTKVEIKRTVAAPSVFIFPPSDEQLKSGTASVVCLLNNFYPREAKVQWKVDNALQSGNSQESVTEQDSKDSTYSLSSTLTLSKADYEKHKVYACEVTHQGLSSPVTKSFNRGEC

SEQ ID NO: 234 - protein, 711 aa, Artificial Sequence; identical to SEQ ID NO: 69
  Made in Lab - RSPO mimetic molecule

SEQ ID NO: 235 - protein, 336 aa, Artificial Sequence
  Made in Lab - RSPO mimetic molecule
NPICKGCLSCSKDNGCSRCQQKLFFFLRREGMRQYGECLHSCPSGYYGHRAPDMNRCARCRIENCDSCRSKDACTKCKVGFYLHRGRCFDECPDGFAPLEETMECVEGGGGSGGGGSGGGGSDIQMTQSPSSLSASVGDRVTITCRASQSVSSAVAWYQQKPGKAPKLLIYSASSLYSGVPSRFSGSRSGTDFTLTISSLQPEDFATYYCQQWYYAPITFGQGTKVEIKRTVAAPSVFIFPPSDEQLKSGTASVVCLLNNFYPREAKVQWKVDNALQSGNSQESVTEQDSKDSTYSLSSTLTLSKADYEKHKVYACEVTHQGLSSPVTKSFNRGEC

SEQ ID NO: 236 - protein, 712 aa, Artificial Sequence; identical to SEQ ID NO: 71
  Made in Lab - RSPO mimetic molecule

SEQ ID NO: 237 - protein, 336 aa, Artificial Sequence
  Made in Lab - RSPO mimetic molecule
NPICKGCLSCSKDNGCSRCQQKLFFFLRREGMRQYGECLHSCPSGYYGHRAPDMNRCARCRIENCDSCRSKDACTKCKVGFYLHRGRCFDECPDGFAPLEETMECVEGGGGSGGGGSGGGGSDIQMTQSPSSPSASVGDRVTITCRASQSISSYLNWYQQKPGKAPKLLIYAASSLQSGVPSRFSGSGSGTDFTLTISSLQPEDFATYYCQQSYSTPLTFGGGTKVEIKRTVAAPSVFIFPPSDEQLKSGTASVVCLLNNFYPREAKVQWKVDNALQSGNSQESVTEQDSKDSTYSLSSTLTLSKADYEKHKVYACEVTHQGLSSPVTKSFNRGEC

SEQ ID NO: 238 - protein, 712 aa, Artificial Sequence; identical to SEQ ID NO: 73
  Made in Lab - RSPO mimetic molecule

SEQ ID NO: 239 - protein, 336 aa, Artificial Sequence; identical to SEQ ID NO: 237
  Made in Lab - RSPO mimetic molecule

SEQ ID NO: 240 - protein, 712 aa, Artificial Sequence; identical to SEQ ID NO: 73
  Made in Lab - RSPO mimetic molecule

SEQ ID NO: 241 - protein, 336 aa, Artificial Sequence; identical to SEQ ID NO: 237
  Made in Lab - RSPO mimetic molecule

SEQ ID NO: 242 - protein, 712 aa, Artificial Sequence; identical to SEQ ID NO: 73
  Made in Lab - RSPO mimetic molecule

SEQ ID NO: 243 - protein, 335 aa, Artificial Sequence
  Made in Lab - RSPO mimetic molecule
NPICKGCLSCSKDNGCSRCQQKLFFFLRREGMRQYGECLHSCPSGYYGHRAPDMNRCARCRIENCDSCRSKDACTKCKVGFYLHRGRCFDECPDGFAPLEETMECVEGGGGSGGGGSGGGGSELTQPPSVSVSPGQTARITCSGDGSYAGSYYYGWYQQKPGQAPVTLIYYNNKRPSGIPERFSGSLSGSTNTLTISGVQAEDEADYYCGSADNSGAAFGGGTKLTVLRTVAAPSVFIFPPSDEQLKSGTASVVCLLNNFYPREAKVQWKVDNALQSGNSQESVTEQDSKDSTYSLSSTLTLSKADYEKHKVYACEVTHQGLSSPVTKSFNRGEC

SEQ ID NO: 244 - protein, 719 aa, Artificial Sequence; identical to SEQ ID NO: 75
  Made in Lab - RSPO mimetic molecule

SEQ ID NO: 245 - protein, 335 aa, Artificial Sequence
  Made in Lab - RSPO mimetic molecule
NPICKGCLSCSKDNGCSRCQQKLFFFLRREGMRQYGECLHSCPSGYYGHRAPDMNRCARCRIENCDSCRSKDACTKCKVGFYLHRGRCFDECPDGFAPLEETMECVEGGGGSGGGGSGGGGSDIQMTQSPSSLSASVGDRVTITCRASQSVSSAVAWYQQKPGKAPKLLIYSASSLYSGVPSRFSGSRSGTDFTLTISSLQPEDFATYYCQQGVYLFTFGQGTKVEIKRTVAAPSVFIFPPSDEQLKSGTASVVCLLNNFYPREAKVQWKVDNALQSGNSQESVTEQDSKDSTYSLSSTLTLSKADYEKHKVYACEVTHQGLSSPVTKSFNRGEC

SEQ ID NO: 246 - protein, 713 aa, Artificial Sequence; identical to SEQ ID NO: 191
  Made in Lab - RSPO mimetic molecule

SEQ ID NO: 247 - protein, 335 aa, Artificial Sequence
  Made in Lab - RSPO mimetic molecule
NPICKGCLSCSKDNGCSRCQQKLFFFLRREGMRQYGECLHSCPSGYYGHRAPDMNRCARCRIENCDSCRSKDACTKCKVGFYLHRGRCFDECPDGFAPLEETMECVEGGGGSGGGGSGGGGSDIQMTQSPSSLSASVGDRVTITCRASQSVSSAVAWYQQKPGKAPKLLIYSASSLYSGVPSRFSGSRSGTDFTLTISSLQPEDFATYYCQQYYSLFTFGQGTKVEIKRTVAAPSVFIFPPSDEQLKSGTASVVCLLNNFYPREAKVQWKVDNALQSGNSQESVTEQDSKDSTYSLSSTLTLSKADYEKHKVYACEVTHQGLSSPVTKSFNRGEC

SEQ ID NO: 248 - protein, 713 aa, Artificial Sequence; identical to SEQ ID NO: 189
  Made in Lab - RSPO mimetic molecule

SEQ ID NO: 249 - protein, 711 aa, Artificial Sequence
  Made in Lab - RSPO mimetic molecule
NPICKGCLSCSKDNGCSRCQQKLFFFLRREGMRQYGECLHSCPSGYYGHRAPDMNRCARCRIENCDSCRSKDACTKCKVGFYLHRGRCFDECPDGFAPLEETMECVEGGGGSGGGGSGGGGSEVQLVESGGGLVQPGGSLRLSCAASGFTFTSYYISWVRQAPGKGLEWVAEISPYSGSTYYADSVKGRFTISADTSKNTAYLQMNSLRAEDTAVYYCALRARPPIRLHPRGSVMDYWGQGTLVTVSSGGGGSGGGGSGGGGSEVQLVESGGGLVQPGGSLRLSCAASGFTFSHYTLSWVRQAPGKGLEWVSVISGDGSYTYYADSVKGRFTISSDNSKNTLYLQMNSLRAEDTAVYYCARNFIKYVFANWGQGTLVTVSSASTKGPSVFPLAPSSKSTSGGTAALGCLVKDYFPEPVTVSWNSGALTSGVHTFPAVLQSSGLYSLSSVVTVPSSSLGTQTYICNVNHKPSNTKVDKKVEPKSCDKTHTCPPCPAPEAAGGPSVFLFPPKPKDTLMISRTPEVTCVVVDVSHEDPEVKFNWYVDGVEVHNAKTKPREEQYNSTYRVVSVLTVLHQDWLNGKEYKCKVSNKALGAPIEKTISKAKGQPREPQVYTLPPSREEMTKNQVSLTCLVKGFYPSDIAVEWESNGQPENNYKTTPPVLDSDGSFFLYSKLTVDKSRWQQGNVFSCSVMHEALHNHYTQKSLSLSPGK

SEQ ID NO: 250 - protein, 335 aa, Artificial Sequence; identical to SEQ ID NO: 20
  Made in Lab - RSPO mimetic molecule

SEQ ID NO: 251 - protein, 710 aa, Artificial Sequence
  Made in Lab - RSPO mimetic molecule
NPICKGCLSCSKDNGCSRCQQKLFFFLRREGMRQYGECLHSCPSGYYGHRAPDMNRCARCRIENCDSCRSKDACTKCKVGFYLHRGRCFDECPDGFAPLEETMECVEGGGGSGGGGSGGGGSEVQLVESGGGLVQPGGSLRLSCAASGFTFTSYYISWVRQAPGKGLEWVAEISPYSGSTYYADSVKGRFTISADTSKNTAYLQMNSLRAEDTAVYYCALRARPPIRLHPRGSVMDYWGQGTLVTVSSGGGGSGGGGSGGGGSEVQLVESGGGLVQPGGSLRLSCAASGFNISSSYIHWVRQAPGKGLEWVAYIYSSYGSTYYADSVKGRFTISADTSKNTAYLQMNSLRAEDTAVYYCARASWYALDYWGQGTLVTVSSASTKGPSVFPLAPSSKSTSGGTAALGCLVKDYFPEPVTVSWNSGALTSGVHTFPAVLQSSGLYSLSSVVTVPSSSLGTQTYICNVNHKPSNTKVDKKVEPKSCDKTHTCPPCPAPEAAGGPSVFLFPPKPKDTLMISRTPEVTCVVVDVSHEDPEVKFNWYVDGVEVHNAKTKPREEQYNSTYRVVSVLTVLHQDWLNGKEYKCKVSNKALGAPIEKTISKAKGQPREPQVYTLPPSREEMTKNQVSLTCLVKGFYPSDIAVEWESNGQPENNYKTTPPVLDSDGSFFLYSKLTVDKSRWQQGNVFSCSVMHEALHNHYTQKSLSLSPGK

SEQ ID NO: 252 - protein, 338 aa, Artificial Sequence; identical to SEQ ID NO: 25
  Made in Lab - RSPO mimetic molecule

SEQ ID NO: 253 - protein, 707 aa, Artificial Sequence
  Made in Lab - RSPO mimetic molecule
NPICKGCLSCSKDNGCSRCQQKLFFFLRREGMRQYGECLHSCPSGYYGHRAPDMNRCARCRIENCDSCRSKDACTKCKVGFYLHRGRCFDECPDGFAPLEETMECVEGGGGSGGGGSGGGGSEVQLVESGGGLVQPGGSLRLSCAASGFTFTSYYISWVRQAPGKGLEWVAEISPYSGSTYYADSVKGRFTISADTSKNTAYLQMNSLRAEDTAVYYCALRARPPIRLHPRGSVMDYWGQGTLVTVSSGGGGSGGGGSGGGGSEVQLVESGGGLVQPGGSLRLSCAASGFNISYSYIHWVRQAPGKGLEWVASIYSSSGSTSYADSVKGRFTISADTSKNTAYLQMNSLRAEDTAVYYCARGAIDYWGQGTLVTVSSASTKGPSVFPLAPSSKSTSGGTAALGCLVKDYFPEPVTVSWNSGALTSGVHTFPAVLQSSGLYSLSSVVTVPSSSLGTQTYICNVNHKPSNTKVDKKVEPKSCDKTHTCPPCPAPEAAGGPSVFLFPPKPKDTLMISRTPEVTCVVVDVSHEDPEVKFNWYVDGVEVHNAKTKPREEQYNSTYRVVSVLTVLHQDWLNGKEYKCKVSNKALGAPIEKTISKAKGQPREPQVYTLPPSREEMTKNQVSLTCLVKGFYPSDIAVEWESNGQPENNYKTTPPVLDSDGSFFLYSKLTVDKSRWQQGNVFSCSVMHEALHNHYTQKSLSLSPGK

SEQ ID NO: 254 - protein, 339 aa, Artificial Sequence; identical to SEQ ID NO: 27
  Made in Lab - RSPO mimetic molecule

SEQ ID NO: 255 - protein, 711 aa, Artificial Sequence
  Made in Lab - RSPO mimetic molecule
NPICKGCLSCSKDNGCSRCQQKLFFFLRREGMRQYGECLHSCPSGYYGHRAPDMNRCARCRIENCDSCRSKDACTKCKVGFYLHRGRCFDECPDGFAPLEETMECVEGGGGSGGGGSGGGGSEVQLVESGGGLVQPGGSLRLSCAASGFTFTSYYISWVRQAPGKGLEWVAEISPYSGSTYYADSVKGRFTISADTSKNTAYLQMNSLRAEDTAVYYCALRARPPIRLHPRGSVMDYWGQGTLVTVSSGGGGSGGGGSGGGGSEVQLVESGGGLVQPGGSLRLSCAASGFNISYYYIHWVRQAPGKGLEWVASIYPSSGYTYYADSVKGRFTISADTSKNTAYLQMNSLRAEDTAVYYCARSSFYWAMDYWGQGTLVTVSSASTKGPSVFPLAPSSKSTSGGTAALGCLVKDYFPEPVTVSWNSGALTSGVHTFPAVLQSSGLYSLSSVVTVPSSSLGTQTYICNVNHKPSNTKVDKKVEPKSCDKTHTCPPCPAPEAAGGPSVFLFPPKPKDTLMISRTPEVTCVVVDVSHEDPEVKFNWYVDGVEVHNAKTKPREEQYNSTYRVVSVLTVLHQDWLNGKEYKCKVSNKALGAPIEKTISKAKGQPREPQVYTLPPSREEMTKNQVSLTCLVKGFYPSDIAVEWESNGQPENNYKTTPPVLDSDGSFFLYSKLTVDKSRWQQGNVFSCSVMHEALHNHYTQKSLSLSPGK

SEQ ID NO: 256 - protein, 337 aa, Artificial Sequence; identical to SEQ ID NO: 29
  Made in Lab - RSPO mimetic molecule

SEQ ID NO: 257 - protein, 712 aa, Artificial Sequence
  Made in Lab - RSPO mimetic molecule
NPICKGCLSCSKDNGCSRCQQKLFFFLRREGMRQYGECLHSCPSGYYGHRAPDMNRCARCRIENCDSCRSKDACTKCKVGFYLHRGRCFDECPDGFAPLEETMECVEGGGGSGGGGSGGGGSEVQLVESGGGLVQPGGSLRLSCAASGFTFTSYYISWVRQAPGKGLEWVAEISPYSGSTYYADSVKGRFTISADTSKNTAYLQMNSLRAEDTAVYYCALRARPPIRLHPRGSVMDYWGQGTLVTVSSGGGGSGGGGSGGGGSEVQLVESGGGLVQPGGSLRLSCAASGFNLSSYSMHWVRQAPGKGLEWVAYISSYYGYTYYADSVKGRFTISADTSKNTAYLQMNSLRAEDTAVYYCARPAPGHWGFDYWGQGTLVTVSSASTKGPSVFPLAPSSKSTSGGTAALGCLVKDYFPEPVTVSWNSGALTSGVHTFPAVLQSSGLYSLSSVVTVPSSSLGTQTYICNVNHKPSNTKVDKKVEPKSCDKTHTCPPCPAPEAAGGPSVFLFPPKPKDTLMISRTPEVTCVVVDVSHEDPEVKFNWYVDGVEVHNAKTKPREEQYNSTYRVVSVLTVLHQDWLNGKEYKCKVSNKALGAPIEKTISKAKGQPREPQVYTLPPSREEMTKNQVSLTCLVKGFYPSDIAVEWESNGQPENNYKTTPPVLDSDGSFFLYSKLTVDKSRWQQGNVFSCSVMHEALHNHYTQKSLSLSPGK

SEQ ID NO: 258 - protein, 336 aa, Artificial Sequence; identical to SEQ ID NO: 56
  Made in Lab - RSPO mimetic molecule

SEQ ID NO: 259 - protein, 712 aa, Artificial Sequence
  Made in Lab - RSPO mimetic molecule
NPICKGCLSCSKDNGCSRCQQKLFFFLRREGMRQYGECLHSCPSGYYGHRAPDMNRCARCRIENCDSCRSKDACTKCKVGFYLHRGRCFDECPDGFAPLEETMECVEGGGGSGGGGSGGGGSEVQLVESGGGLVQPGGSLRLSCAASGFTFTSYYISWVRQAPGKGLEWVAEISPYSGSTYYADSVKGRFTISADTSKNTAYLQMNSLRAEDTAVYYCALRARPPIRLHPRGSVMDYWGQGTLVTVSSGGGGSGGGGSGGGGSEVQLVQSGAEVKKPGASVKVSCKASGGTFSSYAISWVRQAPGQGLEWMGWINAGNGNTTYAQKFQGRVTMTRDTSTSTVYMELSSLRSEDTAVYYCARHYYGSGSYPDWGQGTLVTVSSASTKGPSVFPLAPSSKSTSGGTAALGCLVKDYFPEPVTVSWNSGALTSGVHTFPAVLQSSGLYSLSSVVTVPSSSLGTQTYICNVNHKPSNTKVDKKVEPKSCDKTHTCPPCPAPEAAGGPSVFLFPPKPKDTLMISRTPEVTCVVVDVSHEDPEVKFNWYVDGVEVHNAKTKPREEQYNSTYRVVSVLTVLHQDWLNGKEYKCKVSNKALGAPIEKTISKAKGQPREPQVYTLPPSREEMTKNQVSLTCLVKGFYPSDIAVEWESNGQPENNYKTTPPVLDSDGSFFLYSKLTVDKSRWQQGNVFSCSVMHEALHNHYTQKSLSLSPGK

SEQ ID NO: 260 - protein, 337 aa, Artificial Sequence; identical to SEQ ID NO: 58
  Made in Lab - RSPO mimetic molecule

SEQ ID NO: 261 - protein, 719 aa, Artificial Sequence
  Made in Lab - RSPO mimetic molecule
NPICKGCLSCSKDNGCSRCQQKLFFFLRREGMRQYGECLHSCPSGYYGHRAPDMNRCARCRIENCDSCRSKDACTKCKVGFYLHRGRCFDECPDGFAPLEETMECVEGGGGSGGGGSGGGGSEVQLVESGGGLVQPGGSLRLSCAASGFTFTSYYISWVRQAPGKGLEWVAEISPYSGSTYYADSVKGRFTISADTSKNTAYLQMNSLRAEDTAVYYCALRARPPIRLHPRGSVMDYWGQGTLVTVSSGGGGSGGGGSGGGGSEVQLVESGGGLVQPGGSLRLSCAASGFTFSSFNMFWVRQAPGKGLEWVAGIDDDGSYPNYGSAVKGRATISRDNSKNTLYLQMNSLRAEDTAVYYCAKSGYGGSWGGYIADDIDAWGQGTLVTVSSASTKGPSVFPLAPSSKSTSGGTAALGCLVKDYFPEPVTVSWNSGALTSGVHTFPAVLQSSGLYSLSSVVTVPSSSLGTQTYICNVNHKPSNTKVDKKVEPKSCDKTHTCPPCPAPEAAGGPSVFLFPPKPKDTLMISRTPEVTCVVVDVSHEDPEVKFNWYVDGVEVHNAKTKPREEQYNSTYRVVSVLTVLHQDWLNGKEYKCKVSNKALGAPIEKTISKAKGQPREPQVYTLPPSREEMTKNQVSLTCLVKGFYPSDIAVEWESNGQPENNYKTTPPVLDSDGSFFLYSKLTVDKSRWQQGNVFSCSVMHEALHNHYTQKSLSLSPGK

SEQ ID NO: 262 - protein, 335 aa, Artificial Sequence; identical to SEQ ID NO: 31
  Made in Lab - RSPO mimetic molecule

SEQ ID NO: 263 - protein, 713 aa, Artificial Sequence
  Made in Lab - RSPO mimetic molecule
NPICKGCLSCSKDNGCSRCQQKLFFFLRREGMRQYGECLHSCPSGYYGHRAPDMNRCARCRIENCDSCRSKDACTKCKVGFYLHRGRCFDECPDGFAPLEETMECVEGGGGSGGGGSGGGGSEVQLVESGGGLVQPGGSLRLSCAASGFTFTSYYISWVRQAPGKGLEWVAEISPYSGSTYYADSVKGRFTISADTSKNTAYLQMNSLRAEDTAVYYCALRARPPIRLHPRGSVMDYWGQGTLVTVSSGGGGSGGGGSGGGGSEVQLVESGGGLVQPGGSLRLSCAASGFNIHSSSIHWVRQAPGKGLEWVAATYSSFGSITYADSVKGRFTISADTSKNTAYLQMNSLRAEDTAVYYCARYHHPFGYALDYWGQGTLVTVSSASTKGPSVFPLAPSSKSTSGGTAALGCLVKDYFPEPVTVSWNSGALTSGVHTFPAVLQSSGLYSLSSVVTVPSSSLGTQTYICNVNHKPSNTKVDKKVEPKSCDKTHTCPPCPAPEAAGGPSVFLFPPKPKDTLMISRTPEVTCVVVDVSHEDPEVKFNWYVDGVEVHNAKTKPREEQYNSTYRVVSVLTVLHQDWLNGKEYKCKVSNKALGAPIEKTISKAKGQPREPQVYTLPPSREEMTKNQVSLTCLVKGFYPSDIAVEWESNGQPENNYKTTPPVLDSDGSFFLYSKLTVDKSRWQQGNVFSCSVMHEALHNHYTQKSLSLSPGK

SEQ ID NO: 264 - protein, 336 aa, Artificial Sequence; identical to SEQ ID NO: 62
  Made in Lab - RSPO mimetic molecule

SEQ ID NO: 265 - protein, 713 aa, Artificial Sequence
  Made in Lab - RSPO mimetic molecule
NPICKGCLSCSKDNGCSRCQQKLFFFLRREGMRQYGECLHSCPSGYYGHRAPDMNRCARCRIENCDSCRSKDACTKCKVGFYLHRGRCFDECPDGFAPLEETMECVEGGGGSGGGGSGGGGSEVQLVESGGGLVQPGGSLRLSCAASGFTFTSYYISWVRQAPGKGLEWVAEISPYSGSTYYADSVKGRFTISADTSKNTAYLQMNSLRAEDTAVYYCALRARPPIRLHPRGSVMDYWGQGTLVTVSSGGGGSGGGGSGGGGSEVQLVESGGGLVQPGGSLRLSCAASGFNFSSSSIHWVRQAPGKGLEWVAYIYPSYDYTYYADSVKGRFTISADTSKNTAYLQMNSLRAEDTAVYYCARGYFYTWGGMDYWGQGTLVTVSSASTKGPSVFPLAPSSKSTSGGTAALGCLVKDYFPEPVTVSWNSGALTSGVHTFPAVLQSSGLYSLSSVVTVPSSSLGTQTYICNVNHKPSNTKVDKKVEPKSCDKTHTCPPCPAPEAAGGPSVFLFPPKPKDTLMISRTPEVTCVVVDVSHEDPEVKFNWYVDGVEVHNAKTKPREEQYNSTYRVVSVLTVLHQDWLNGKEYKCKVSNKALGAPIEKTISKAKGQPREPQVYTLPPSREEMTKNQVSLTCLVKGFYPSDIAVEWESNGQPENNYKTTPPVLDSDGSFFLYSKLTVDKSRWQQGNVFSCSVMHEALHNHYTQKSLSLSPGK

SEQ ID NO: 266 - protein, 336 aa, Artificial Sequence; identical to SEQ ID NO: 60
  Made in Lab - RSPO mimetic molecule

SEQ ID NO: 267 - protein, 457 aa, Artificial Sequence
  Made in Lab - RSPO mimetic molecule
NPICKGCLSCSKDNGCSRCQQKLFFFLRREGMRQYGECLHSCPSGYYGHRAPDMNRCARCRIENCDSCRSKDACTKCKVGFYLHRGRCFDECPDGFAPLEETMECVEGGGGSGGGGSGGGGSDIQMTQSPSSLSASVGDRVTITCRASQDVSTAVAWYQQKPGKAPKLLIYSASFLYSGVPSRFSGSGSGTDFTLTISSLQPEDFATYYCQQSYTTPPTFGQGTKVEIKGGGGSGGGGSGGGGSDIELTQPPSVSVAPGQTARISCSGDNIGSFYVHWYQQKPGQAPVLVIYDKSNRPSGIPERFSGSNSGNTATLTISGTQAEDEADYYCQSYANTLSLVFGGGTKLTVLGQPKAAPSVTLFPPSSEELQANKATLVCLISDFYPGAVTVAWKADSSPVKAGVETTTPSKQSNNKYAASSYLSLTPEQWKSHRSYSCQVTHEGSTVEKTVAPTECS

SEQ ID NO: 268 - protein, 589 aa, Artificial Sequence; identical to SEQ ID NO: 19
  Made in Lab - RSPO mimetic molecule

SEQ ID NO: 269 - protein, 460 aa, Artificial Sequence
  Made in Lab - RSPO mimetic molecule
NPICKGCLSCSKDNGCSRCQQKLFFFLRREGMRQYGECLHSCPSGYYGHRAPDMNRCARCRIENCDSCRSKDACTKCKVGFYLHRGRCFDECPDGFAPLEETMECVEGGGGSGGGGSGGGGSDIQMTQSPSSLSASVGDRVTITCRASQDVSTAVAWYQQKPGKAPKLLIYSASFLYSGVPSRFSGSGSGTDFTLTISSLQPEDFATYYCQQSYTTPPTFGQGTKVEIKGGGGSGGGGSGGGGSDIQMTQSPSSLSASVGDRVTITCRASQSVSSAVAWYQQKPGKAPKLLIYSASSLYSGVPSRFSGSRSGTDFTLTISSLQPEDFATYYCQQYWYGVAPITFGQGTKVEIKRTVAAPSVFIFPPSDEQLKSGTASVVCLLNNFYPREAKVQWKVDNALQSGNSQESVTEQDSKDSTYSLSSTLTLSKADYEKHKVYACEVTHQGLSSPVTKSFNRGEC

SEQ ID NO: 270 - protein, 588 aa, Artificial Sequence; identical to SEQ ID NO: 24
  Made in Lab - RSPO mimetic molecule

SEQ ID NO: 271 - protein, 461 aa, Artificial Sequence
  Made in Lab - RSPO mimetic molecule
NPICKGCLSCSKDNGCSRCQQKLFFFLRREGMRQYGECLHSCPSGYYGHRAPDMNRCARCRIENCDSCRSKDACTKCKVGFYLHRGRCFDECPDGFAPLEETMECVEGGGGSGGGGSGGGGSDIQMTQSPSSLSASVGDRVTITCRASQDVSTAVAWYQQKPGKAPKLLIYSASFLYSGVPSRFSGSGSGTDFTLTISSLQPEDFATYYCQQSYTTPPTFGQGTKVEIKGGGGSGGGGSGGGGSDIQMTQSPSSLSASVGDRVTITCRASQSVSSAVAWYQQKPGKAPKLLIYSASSLYSGVPSRFSGSRSGTDFTLTISSLQPEDFATYYCQQWYSSGHVLITFGQGTKVEIKRTVAAPSVFIFPPSDEQLKSGTASVVCLLNNFYPREAKVQWKVDNALQSGNSQESVTEQDSKDSTYSLSSTLTLSKADYEKHKVYACEVTHQGLSSPVTKSFNRGEC

SEQ ID NO: 272 - protein, 585 aa, Artificial Sequence; identical to SEQ ID NO: 26
  Made in Lab - RSPO mimetic molecule

SEQ ID NO: 273 - protein, 458 aa, Artificial Sequence
  Made in Lab - RSPO mimetic molecule
NPICKGCLSCSKDNGCSRCQQKLFFFLRREGMRQYGECLHSCPSGYYGHRAPDMNRCARCRIENCDSCRSKDACTKCKVGFYLHRGRCFDECPDGFAPLEETMECVEGGGGSGGGGSGGGGDIQMTQSPSSLSASVGDRVTITCRASQDVSTAVAWYQQKPGKAPKLLIYSASFLYSGVPSRFSGSGSGTDFTLTISSLQPEDFATYYCQQSYTTPPTFGQGTKVEIKGGGGSGGGGSGGGGSDIQMTQSPSSLSASVGDRVTITCRASQSVSSAVAWYQQKPGKAPKLLIYSASSLYSGVPSRFSGSRSGTDFTLTISSLQPEDFATYYCQQSYAAYLFTFGQGTKVEIKRTVAAPSVFIFPPSDEQLKSGTASVVCLLNNFYPREAKVQWKVDNALQSGNSQESVTEQDSKDSTYSLSSTLTLSKADYEKHKVYACEVTHQGLSSPVTKSFNRGEC

SEQ ID NO: 274 - protein, 589 aa, Artificial Sequence; identical to SEQ ID NO: 28
  Made in Lab - RSPO mimetic molecule

SEQ ID NO: 275 - protein, 458 aa, Artificial Sequence
  Made in Lab - RSPO mimetic molecule
NPICKGCLSCSKDNGCSRCQQKLFFFLRREGMRQYGECLHSCPSGYYGHRAPDMNRCARCRIENCDSCRSKDACTKCKVGFYLHRGRCFDECPDGFAPLEETMECVEGGGGSGGGGSGGGGSDIQMTQSPSSLSASVGDRVTITCRASQDVSTAVAWYQQKPGKAPKLLIYSASFLYSGVPSRFSGSGSGTDFTLTISSLQPEDFATYYCQQSYTTPPTFGQGTKVEIKGGGGSGGGGSGGGGSDIQMTQSPSSLSASVGDRVTITCRASQSVSSAVAWYQQKPGKAPKLLIYSASSLYSGVPSRFSGSRSGTDFTLTISSLQPEDFATYYCQQWYYAPITFGQGTKVEIKRTVAAPSVFIFPPSDEQLKSGTASVVCLLNNFYPREAKVQWKVDNALQSGNSQESVTEQDSKDSTYSLSSTLTLSKADYEKHKVYACEVTHQGLSSPVTKSFNRGEC

SEQ ID NO: 276 - protein, 590 aa, Artificial Sequence; identical to SEQ ID NO: 55
  Made in Lab - RSPO mimetic molecule

SEQ ID NO: 277 - protein, 459 aa, Artificial Sequence
  Made in Lab - RSPO mimetic molecule
NPICKGCLSCSKDNGCSRCQQKLFFFLRREGMRQYGECLHSCPSGYYGHRAPDMNRCARCRIENCDSCRSKDACTKCKVGFYLHRGRCFDECPDGFAPLEETMECVEGGGGSGGGGSGGGGSDIQMTQSPSSLSASVGDRVTITCRASQDVSTAVAWYQQKPGKAPKLLIYSASFLYSGVPSRFSGSGSGTDFTLTISSLQPEDFATYYCQQSYTTPPTFGQGTKVEIKRGGGGSGGGGSGGGGSDIQMTQSPSSPSASVGDRVTITCRASQSISSYLNWYQQKPGKAPKLLIYAASSLQSGVPSRFSGSGSGTDFTLTISSLQPEDFATYYCQQSYSTPLTFGGGTKVEIKRTVAAPSVFIFPPSDEQLKSGTASVVCLLNNFYPREAKVQWKVDNALQSGNSQESVTEQDSKDSTYSLSSTLTLSKADYEKHKVYACEVTHQGLSSPVTKSFNRGEC

SEQ ID NO: 278 - protein, 590 aa, Artificial Sequence; identical to SEQ ID NO: 57
  Made in Lab - RSPO mimetic molecule

SEQ ID NO: 279 - protein, 457 aa, Artificial Sequence
  Made in Lab - RSPO mimetic molecule
NPICKGCLSCSKDNGCSRCQQKLFFFLRREGMRQYGECLHSCPSGYYGHRAPDMNRCARCRIENCDSCRSKDACTKCKVGFYLHRGRCFDECPDGFAPLEETMECVEGGGGSGGGGSGGGGSDIQMTQSPSSLSASVGDRVTITCRASQDVSTAVAWYQQKPGKAPKLLIYSASFLYSGVPSRFSGSGSGTDFTLTISSLQPEDFATYYCQQSYTTPPTFGQGTKVEIKGGGGSGGGGSGGGGSELTQPPSVSVSPGQTARITCSGDGSYAGSYYYGWYQQKPGQAPVTLIYYNNKRPSGIPERFSGSLSGSTNTLTISGVQAEDEADYYCGSADNSGAAFGGGTKLTVLRTVAAPSVFIFPPSDEQLKSGTASVVCLLNNFYPREAKVQWKVDNALQSGNSQESVTEQDSKDSTYSLSSTLTLSKADYEKHKVYACEVTHQGLSSPVTKSFNRGEC

SEQ ID NO: 280 - protein, 597 aa, Artificial Sequence; identical to SEQ ID NO: 30
  Made in Lab - RSPO mimetic molecule

SEQ ID NO: 281 - protein, 458 aa, Artificial Sequence
  Made in Lab - RSPO mimetic molecule
NPICKGCLSCSKDNGCSRCQQKLFFFLRREGMRQYGECLHSCPSGYYGHRAPDMNRCARCRIENCDSCRSKDACTKCKVGFYLHRGRCFDECPDGFAPLEETMECVEGGGGSGGGGSGGGGSDIQMTQSPSSLSASVGDRVTITCRASQDVSTAVAWYQQKPGKAPKLLIYSASFLYSGVPSRFSGSGSGTDFTLTISSLQPEDFATYYCQQSYTTPPTFGQGTKVEIKRGGGGSGGGGSGGGGSDIQMTQSPSSLSASVGDRVTITCRASQSVSSAVAWYQQKPGKAPKLLIYSASSLYSGVPSRFSGSRSGTDFTLTISSLQPEDFATYYCQQGVYLFTFGQGTKVEIKRTVAAPSVFIFPPSDEQLKSGTASVVCLLNNFYPREAKVQWKVDNALQSGNSQESVTEQDSKDSTYSLSSTLTLSKADYEKHKVYACEVTHQGLSSPVTKSFNRGEC

SEQ ID NO: 282 - protein, 591 aa, Artificial Sequence; identical to SEQ ID NO: 61
  Made in Lab - RSPO mimetic molecule

SEQ ID NO: 283 - protein, 458 aa, Artificial Sequence
  Made in Lab - RSPO mimetic molecule
NPICKGCLSCSKDNGCSRCQQKLFFFLRREGMRQYGECLHSCPSGYYGHRAPDMNRCARCRIENCDSCRSKDACTKCKVGFYLHRGRCFDECPDGFAPLEETMECVEGGGGSGGGGSGGGGSDIQMTQSPSSLSASVGDRVTITCRASQDVSTAVAWYQQKPGKAPKLLIYSASFLYSGVPSRFSGSGSGTDFTLTISSLQPEDFATYYCQQSYTTPPTFGQGTKVEIKRGGGGSGGGGSGGGGSDIQMTQSPSSLSASVGDRVTITCRASQSVSSAVAWYQQKPGKAPKLLIYSASSLYSGVPSRFSGSRSGTDFTLTISSLQPEDFATYYCQQYYSLFTFGQGTKVEIKRTVAAPSVFIFPPSDEQLKSGTASVVCLLNNFYPREAKVQWKVDNALQSGNSQESVTEQDSKDSTYSLSSTLTLSKADYEKHKVYACEVTHQGLSSPVTKSFNRGEC

SEQ ID NO: 284 - protein, 591 aa, Artificial Sequence; identical to SEQ ID NO: 59
  Made in Lab - RSPO mimetic molecule

SEQ ID NO: 285 - protein, 459 aa, Artificial Sequence
  Made in Lab - RSPO mimetic molecule
DIQMTQSPSSLSASVGDRVTITCRASQDVSTAVAWYQQKPGKAPKLLIYSASFLYSGVPSRFSGSGSGTDFTLTISSLQPEDFATYYCQQSYTTPPTFGQGTKVEIKGGGGSGGGGSGGGGSDIQMTQSPSSLSASVGDRVTITCRASQSVSSAVAWYQQKPGKAPKLLIYSASSLYSGVPSRFSGSRSGTDFTLTISSLQPEDFATYYCQQSYAAYLFTFGQGTKVEIKRTVAAPSVFIFPPSDEQLKSGTASVVCLLNNFYPREAKVQWKVDNALQSGNSQESVTEQDSKDSTYSLSSTLTLSKADYEKHKVYACEVTHQGLSSPVTKSFNRGECGGGGSGSGGSGGGGSNPICKGCLSCSKDNGCSRCQQKLFFFLRREGMRQYGECLHSCPSGYYGHRAPDMNRCARCRIENCDSCRSKDACTKCKVGFYLHRGRCFDECPDGFAPLEETMECVE

SEQ ID NO: 286 - protein, 589 aa, Artificial Sequence; identical to SEQ ID NO: 28
  Made in Lab - RSPO mimetic molecule

SEQ ID NO: 287 - protein, 458 aa, Artificial Sequence
  Made in Lab - RSPO mimetic molecule
DIQMTQSPSSLSASVGDRVTITCRASQDVSTAVAWYQQKPGKAPKLLIYSASFLYSGVPSRFSGSGSGTDFTLTISSLQPEDFATYYCQQSYTTPPTFGQGTKVEIKGGGGSGGGGSGGGGSDIQMTQSPSSLSASVGDRVTITCRASQSVSSAVAWYQQKPGKAPKLLIYSASSLYSGVPSRFSGSRSGTDFTLTISSLQPEDFATYYCQQWYYAPITFGQGTKVEIKRTVAAPSVFIFPPSDEQLKSGTASVVCLLNNFYPREAKVQWKVDNALQSGNSQESVTEQDSKDSTYSLSSTLTLSKADYEKHKVYACEVTHQGLSSPVTKSFNRGECGGGGSGSGGSGGGGSNPICKGCLSCSKDNGCSRCQQKLFFFLRREGMRQYGECLHSCPSGYYGHRAPDMNRCARCRIENCDSCRSKDACTKCKVGFYLHRGRCFDECPDGFAPLEETMECVE

SEQ ID NO: 288 - protein, 590 aa, Artificial Sequence; identical to SEQ ID NO: 55
  Made in Lab - RSPO mimetic molecule

What is claimed is:

1. A WNT super agonist molecule, comprising:
a) a Frizzled (FZD) binding domain;
b) an LRP5/6 binding domain; and
c) an E3 ligase binding domain,
wherein the super agonist molecule activates the canonical WNT signaling pathway in a cell.

2. The super agonist molecule of claim 1, wherein:
a) the FZD binding domain binds one or more FZD receptor;
b) the LRP5/6 binding domain binds one or more of LRP5 and/or LRP6; and
c) the E3 ligase binding domain binds ZNRF3 and/or RNF43.

3. The super agonist molecule of claim 1 or claim 2, comprising one or more polypeptides, wherein at least one polypeptide comprises a FZD binding domain fused to an LRP5/6 binding domain, and wherein at least one polypeptide comprises an E3 ligase binding domain fused to a FZD binding domain or an LRP5/6 binding domain.

4. The super agonist molecule of claim 3, wherein the fused binding domains are fused directly together and/or fused via a peptide linker.

5. The super agonist molecule of claim 4, wherein the peptide linker is about 1 amino acid in length to about 30 amino acids in length.

6. The super agonist molecule of claim 5, wherein the peptide linker is about 5 amino acids in length to about 15 amino acids in length, optionally 5, 6, 7, 8, 9, 10, 11, 12, 13, 14 or 15 amino acids in length.

7. The super agonist molecule of any one of claims 4-6, wherein the peptide linker comprises one or more glycine and/or serine residues.

8. The super agonist molecule of any one of claims 1-7, wherein at least one of the binding domains is selected from the group consisting of: an scFv, a VHH/sdAb, a Fab fragment, a Fab′2 fragment, a diabody, and an Fv fragment.

9. The super agonist of any one of claims 1-8, wherein at least one of the binding domains is fused to an Fc fragment, optionally wherein the Fc fragment is from an IgG, IgM, IgA, IgD or IgE antibody isotype or an α, δ, ε, γ, or μ antibody heavy chain.

10. The super agonist molecule of claim 9, having a structure depicted in Table 3 or Table 4.

11. The super agonist molecule of claim 10, having the Fv-IgG structure.

12. The super agonist of any one of claims 1-10, wherein the WNT enhancer comprises an E3 ligase binding domain selected from the group consisting of: a mutant R-spondin (RSPO) protein and an antibody or functional fragment thereof.

13. The super agonist molecule of claim 12, wherein the mutant RSPO protein has reduced binding to Leucine-rich repeat-containing G-protein receptors 4-6 (LGR4-6) as compared to wild type RSPO.

14. The super agonist molecule of claim 12, wherein the E3 ligase binding domain binds a Zinc and Ring Finger 3 (ZNRF3) and/or a Ring Finger Protein 43 (RNF43).

15. The super agonist molecule of claim 14, wherein the E3 ligase binding domain is selected from the group consisting of: an scFv, a VHH/sdAb, a Fab fragment, a Fab′2 fragment, a diabody, and an Fv fragment.

16. The super agonist molecule of claim 15, wherein the E3 ligase binding domain is fused to a C-terminus of an Fc fragment of an Fv-IgG, either directly or via a linker, optionally wherein the linker is a peptide linker of about 1 amino acid in length to about 30 amino acids in length, or about 5 amino acids in length to about 15 amino acids in length, or 5, 6, 7, 8, 9, 10, 11, 12, 13, 14 or 15 amino acids in length.

17. The super agonist of claim 15, wherein the E3 ligase binding domain is fused to a C-terminus of:
a) a light chain or fragment thereof of a FZD binding domain;
b) a heavy chain or fragment thereof of a FZD binding domain;
c) a light chain or fragment thereof of a LRP5/6 binding domain; or
b) a heavy chain or fragment thereof of a LRP5/6 binding domain,
either directly or via a linker, optionally wherein the linker is a peptide linker of about 1 amino acid in length to about 30 amino acids in length, or about 5 amino acids in length to about 15 amino acids in length, or 5, 6, 7, 8, 9, 10, 11, 12, 13, 14 or 15 amino acids in length.

18. The super agonist of claim 15, wherein the binding domain that binds an E3 ubiquitin ligase is fused to a N-terminus of:
a) a light chain or fragment thereof of a FZD binding domain;
b) a heavy chain or fragment thereof of a FZD binding domain;
c) a light chain or fragment thereof of a LRP5/6 binding domain; or
b) a heavy chain or fragment thereof of a LRP5/6 binding domain,
either directly or via a linker, optionally wherein the linker is a peptide linker of about 1 amino acid in length to about 30 amino acids in length, or about 5 amino acids in length to about 15 amino acids in length, or 5, 6, 7, 8, 9, 10, 11, 12, 13, 14 or 15 amino acids in length.

19. The super agonist of any of claims 1-18, comprising a polypeptide having at least 90% or 95% sequence identity to a sequence provided in Table 3 or Table 4, or a combination of polypeptides, each having at least 90% or 95% sequence identity to a sequence provided in Table 3 or Table 4.

20. A pharmaceutical composition comprising the WNT super agonist molecule according to any of claims 1-19 and a pharmaceutically acceptable diluent, excipient, or carrier.

21. A method for treating a subject having a disease or disorder associated with reduced WNT signaling, comprising administering to the subject an effective amount of the WNT super agonist molecule according to any of claims 1-19 or the pharmaceutical composition of claim 20.

22. The method of claim 21, wherein the disease or disorder is selected from the group consisting of: oral mucositis, short bowel syndrome, inflammatory bowel diseases (IBD), other gastrointestinal disorders; treatment of metabolic syndrome, dyslipidemia, treatment of diabetes, treatment of pancreatitis, conditions where exocrine or endocrine pancreas tissues are damaged; conditions where enhanced epidermal regeneration is desired, e.g., epidermal wound healing, treatment of diabetic foot ulcers, syndromes involving tooth, nail, or dermal hypoplasia, etc., conditions where angiogenesis is beneficial; myocardial infarction, coronary artery disease, heart failure; immunodeficiencies, graft versus host diseases, acute kidney injuries, chronic kidney diseases, chronic obstructive pulmonary diseases (COPD), idiopathic pulmonary fibrosis (IPF), cirrhosis, acute liver failure, chronic liver diseases with hepatitis C or B virus infection or post-antiviral drug therapies, alcoholic liver diseases, alcoholic hepatitis, non-alcoholic liver diseases with steatosis or steatohepatitis, treatment of hearing loss, including internal and external loss of auditory hair cells, vestibular hypofunction, macular degeneration, treatment of various retinopathies, including but not limited to vitreoretinopathy, diabetic retinopathy, other diseases of retinal degeneration, wet age-related macular degeneration (AMD), dry AMD), Fuchs' dystrophy, other corneal diseases, stroke, traumatic brain injury, Alzheimer's disease, multiple sclerosis and other conditions affecting the blood brain barrier; bone diseases, spinal cord injuries, other spinal cord diseases, and alopecia.

23. A method of generating, culturing, or maintaining an organ, tissue, cell, or organoid culture, comprising contacting the organ, tissue, cell, or organoid culture with:
a) the WNT super agonist molecule of any one of claims 1-19; or
b) the pharmaceutical composition of claim 20.

24. The method of claim 23 for maintaining viability of the organ or tissue ex vivo, comprising:
a) contacting an organ or tissue obtained from a donor ex vivo with a composition comprising the WNT super agonist molecule or the pharmaceutical composition, optionally by perfusion; or
b) contacting a donor organ or tissue in vivo with a composition comprising the WNT super agonist molecule or the pharmaceutical composition.

25. The method of claim 23 for generating or maintaining the organoid culture, comprising contacting the organoid culture, optionally by culturing the organoid culture in a medium comprising the WNT super agonist molecule.

26. A method for inducing bone formation or increasing bone density in a subject, comprising administering to the subject an effective amount of the WNT super agonist molecule according to any of claims 1-19 or the pharmaceutical composition of claim 20.

27. The method of claim 26, wherein the WNT super agonist molecule binds FZD5, FZD8, and FZD9.

28. A method for regenerating a salivary gland or inducing salivary gland growth in a subject, comprising administering to the subject an effective amount of the WNT super agonist molecule according to any of claims 1-19 or the pharmaceutical composition of claim 20.

29. The method of claim 28 for treating hyposalivation in the subject.

30. The method of claim 28 or claim 29, wherein the WNT super agonist molecule binds FZD1, FZD2, and FZD7.

31. An R-spondin (RSPO) mimetic comprising a first binding composition that binds a WNT receptor and a second binding composition that binds an E3 ubiquitin ligase.

32. The RSPO mimetic of claim 31, wherein the first binding composition binds a FZD receptor or an LRP receptor, optionally LRP5 and/or LRP6.

33. The RPSO mimetic of claim 31 or claim 32, wherein the first binding composition is selected from the group consisting of: an scFv, a VHH/sdAb, a Fab fragment, a Fab′2 fragment, a diabody, and an Fv fragment.

34. The RSPO mimetic of claim 31 or claim 32, wherein the second binding composition is an RSPO protein, optionally a mutant RSPO protein, or an antibody or fragment thereof that binds an E3 ubiquitin ligase.

35. The RSPO mimetic of any one of claims 31-34, wherein the binding compositions are fused directly together or via a peptide linker.

36. The RSPO mimetic of claim 35, wherein the peptide linker is about 1 amino acid in length to about 30 amino acids in length.

37. The RSPO mimetic of claim 36, wherein the peptide linker is about 5 amino acids in length to about 15 amino acids in length, optionally 5, 6, 7, 8, 9, 10, 11, 12, 13, 14 or 15 amino acids in length.

38. The RSPO mimetic of any one of claims 35-37, wherein the peptide linker comprises one or more glycine and/or serine residues.

39. The RSPO mimetic of any of claims 31-38, comprising a polypeptide having at least 90% or 95% sequence identity to a sequence provided in Table 3 or Table 4, or a combination of polypeptides, each having at least 90% or 95% sequence identity to a sequence provided in Table 3 or Table 4.

40. A pharmaceutical composition comprising the RSPO mimetic according to any of claims 31-39 and a pharmaceutically acceptable diluent, excipient, or carrier.

41. A method for treating a subject having a disease or disorder associated with reduced WNT signaling, comprising administering to the subject an effective amount of the RSPO according to any of claims 31-39 or the pharmaceutical composition of claim 40.

42. The method of claim 41, wherein the disease or disorder is selected from the group consisting of: oral mucositis, short bowel syndrome, inflammatory bowel diseases (IBD), other gastrointestinal disorders; treatment of metabolic syndrome, dyslipidemia, treatment of diabetes, treatment of pancreatitis, conditions where exocrine or endocrine pancreas tissues are damaged; conditions where enhanced epidermal regeneration is desired, e.g., epidermal wound healing, treatment of diabetic foot ulcers, syndromes involving tooth, nail, or dermal hypoplasia, etc., conditions where angiogenesis is beneficial; myocardial infarction, coronary artery disease, heart failure; immunodeficiencies, graft versus host diseases, acute kidney injuries, chronic kidney diseases, chronic obstructive pulmonary diseases (COPD), idiopathic pulmonary fibrosis (IPF), cirrhosis, acute liver failure, chronic liver diseases with hepatitis C or B virus infection or post-antiviral drug therapies, alcoholic liver diseases, alcoholic hepatitis, non-alcoholic liver diseases with steatosis or steatohepatitis, treatment of hearing loss, including internal and external loss of auditory hair cells, vestibular hypofunction, macular degeneration, treatment of vitreoretinopathy, diabetic retinopathy, other diseases of retinal degeneration, Fuchs' dystrophy, other corneal diseases, stroke, traumatic brain injury, Alzheimer's disease, multiple sclerosis and other conditions affecting the blood brain barrier; spinal cord injuries, bone diseases, other spinal cord diseases, and alopecia.

43. A WNT surrogate comprising:
a) a Frizzled (FZD) binding domain; and
b) an LRP5/6 binding domain,
wherein the super agonist molecule activates the canonical WNT signaling pathway in a cell.

44. The WNT surrogate of claim 43, wherein
a) the FZD binding domain binds one or more FZD receptor; and
b) the LRP5/6 binding domain binds LRP5 and/or LRP6.

45. The WNT surrogate of claim 43 or claim 44, wherein the FZD binding domain is selected from the group consisting of: an scFv, a VHH/sdAb, a Fab fragment, a Fab′2 fragment, a diabody, and an Fv fragment.

46. The WNT surrogate of any one of claims 43-45, wherein the LRP5/6 binding domain is selected from the group consisting of: an scFv, a VHH/sdAb, a Fab fragment, a Fab′2 fragment, a diabody, and an Fv fragment.

47. The WNT surrogate of any one of claims 43-46, wherein the binding domains are fused directly together or via a peptide linker.

48. The WNT surrogate of claim 47, wherein the peptide linker is about 1 amino acid in length to about 30 amino acids in length.

49. The WNT surrogate of claim 48, wherein the peptide linker is about 5 amino acids in length to about 15 amino acids in length, optionally 5, 6, 7, 8, 9, 10, 11, 12, 13, 14 or 15 amino acids in length.

50. The WNT surrogate of any one of claims 47-49, wherein the peptide linker comprises one or more glycine and/or serine residues.

51. The WNT surrogate of any of claims 43-50, comprising a polypeptide having at least 90% or 95% sequence identity to a sequence provided in Table 3 or Table 4, or a combination of polypeptides, each having at least 90% or 95% sequence identity to a sequence provided in Table 3 or Table 4.

52. A pharmaceutical composition comprising the RSPO mimetic according to any of claims 43-51 and a pharmaceutically acceptable diluent, excipient, or carrier.

53. A method for treating a subject having a disease or disorder associated with reduced WNT signaling, comprising administering to the subject an effective amount of the WNT surrogate according to any of claims 43-51 or the pharmaceutical composition of claim 52.

54. The method of claim 53, wherein the disease or disorder is selected from the group consisting of: oral mucositis, short bowel syndrome, inflammatory bowel diseases (IBD), other gastrointestinal disorders; treatment of metabolic syndrome, dyslipidemia, treatment of diabetes, treatment of pancreatitis, conditions where exocrine or endocrine pancreas tissues are damaged; conditions where enhanced epidermal regeneration is desired, e.g., epidermal wound healing, treatment of diabetic foot ulcers, syndromes involving tooth, nail, or dermal hypoplasia, etc., conditions where angiogenesis is beneficial; myocardial infarction, coronary artery disease, heart failure; immunodeficiencies, graft versus host diseases, acute kidney injuries, chronic kidney diseases, chronic obstructive pulmonary diseases (COPD), idiopathic pulmonary fibrosis (IPF), cirrhosis, acute liver failure, chronic liver diseases with hepatitis C or B virus infection or post-antiviral drug therapies, alcoholic liver diseases, alcoholic hepatitis, non-alcoholic liver diseases with steatosis or steatohepatitis, treatment of hearing loss, including internal and external loss of auditory hair cells, vestibular hypofunction, macular degeneration, treatment of vitreoretinopathy, diabetic retinopathy, other diseases of retinal degeneration, Fuchs' dystrophy, other corneal diseases, stroke, traumatic brain injury, Alzheimer's disease, multiple sclerosis and other conditions affecting the blood brain barrier; bone diseases, spinal cord injuries, other spinal cord diseases, and alopecia.

55. A method of generating, culturing, or maintaining an organ, tissue, cell, or organoid culture, comprising contacting the organ, tissue, cell, or organoid culture with:
a) the WNT surrogate molecule of any of claims 43-51; or
b) or the pharmaceutical composition of claim 52.

56. The method of claim 55 for maintaining viability of the organ or tissue ex vivo, comprising:
a) contacting an organ or tissue obtained from a donor ex vivo with a composition comprising the WNT surrogate molecule or the pharmaceutical composition, optionally by perfusion; or
b) contacting a donor organ or tissue in vivo with a composition comprising the WNT surrogate molecule or the pharmaceutical composition.

57. The method of claim 55 for generating or maintaining the organoid culture, comprising contacting the organoid culture, optionally by culturing the organoid culture in a medium comprising the WNT surrogate molecule.

58. A method for inducing bone formation or increasing bone density in a subject, comprising administering to the subject an effective amount of the WNT surrogate molecule of any of claims 43-51 or the pharmaceutical composition of claim 52.

59. The method of claim 58, wherein the WNT surrogate molecule binds FZD5, FZD8, and FZD9.

60. A method for regenerating a salivary gland or inducing salivary gland growth in a subject, comprising administering to the subject an effective amount of the WNT surrogate molecule according to any of claims 43-51 or the pharmaceutical composition of claim 52.

61. The method of claim 60 for treating hyposalivation in the subject.

62. The method of claim 60 or claim 61, wherein the WNT surrogate molecule binds FZD1, FZD2, and FZD7.
